United States Patent Application Publication US 2013/0332133 A1 - sequence listing, part 53

SEQ ID NO: 318863 - DNA, 814 bp, Unknown
  Bacterial polypeptide expressing nucleotide sequence isolated from the Sargasso Sea
tatttagaaaagaatgacattccaggtatttatgatcttgatacaagagcaataacaagaaaacttagagattcaggcgtgatgatgggaattctaactatttcagatgatattgatgagtgtatagagaaaattaataaaagtcctagatatggtgaatttgatgttgtaagtcaggtgactacgaaaaatatatataattgggaattacctaagtcagatttcaataaaagaagttttattgatctagttagtaggacaaaaaaaaccacaaaaaaatataatattgttctctttgattatggtgttaagtttaatattcttagatctttgcatgcaagaaattgtaatataactgtagttccaaaaaatgcatctttgaatgatgtaaataatcttaatcccgatggaattgttttatctcctggaccaggtaaccctgaatttttagatgattcaatagaagttattcggtcattatctgggtccaagccaattctaggtatctgtcttggtcatcaattacttggtagagcatttggcgctaaaacatttaagctaccttttgggcatagaggaggaaatcaaccaattcgagaattgagtaccgggaaagtatatgtaacagctcaaaatcatggttatgctctggagtcagaaaatttatcaagcgacgttaaagttagtcatataaatattaatgataatactgtagcaggattagtaagtgataaatttaaaattttgtctatacaatatcattctgaagcgtctccgggtccacatgatagtgagtatatctttgataaattta

SEQ ID NO: 318864 - DNA, 339 bp, Unknown
  Bacterial polypeptide expressing nucleotide sequence isolated from the Sargasso Sea
ggcaccagatcctggctttggcgttagactgcaaaacctacaaactcaaatgcggacatcatggagggaaccatcctgtaatggattaccagaccaacaagattgagatcacaagccataatcatggattttctgtggacgaagacagtctttcggaagacgtcagagtgacccacagaaatcttaacgatcaaacggttgaaggtctagaatcacttcagtaccccgcctattccgttcaataccaccccgaggcggcaccaggccctagggatgcccgctatctcttcaaacgatttgttgagatgatgggaaacaccaagcgaagaagttcctgag

SEQ ID NO: 318865 - DNA, 277 bp, Unknown
  Bacterial polypeptide expressing nucleotide sequence isolated from the Sargasso Sea
cttgcaacctgaaaaatgtaacgcagcattagtattacaagacggcagtgttttctggggatttggagctgggttgagcggccaagactataaagatacagtgggcgaagtatgcttcaatacttcttatacaggatatcaagaaatattgactgacccatcatactgcgaccagatagtaacctttacaagttcgcatataggaaacgtgggaaccaataaccaagataccgagaccaaacagcctagtgtcagaggttgcataattgctaatgat

SEQ ID NO: 318866 - DNA, 184 bp, Unknown
  Bacterial polypeptide expressing nucleotide sequence isolated from the Sargasso Sea
atgaaaaaaaatgtttcatctaataaacctacagcttgtctcgcgttagcagacggaactttattttttggtaaaggatttggatcaactggtgaaacgactgcagaactttgcttcaatacatcaataacaggatatcaggaaattctgactgatccttcttatgcacgccaaattataacct

SEQ ID NO: 318867 - DNA, 764 bp, Unknown
  Bacterial polypeptide expressing nucleotide sequence isolated from the Sargasso Sea
tttgagacaggccctaaaaagaaaagaagataaatcatataatttttcgacaggcattttagtttttgaagatggaacaaaattcttcggtaatggtctaggttacgaaggaaacgctataggagaagtatgtttcaacacatcaattacaggttatcaagaaataataactgatccgtcttactcggatcaaataataaattttacatttccacacattggtaacgtgggtacgaatattcatgataacgaagcagataaagcttgggtgaaaggtgttattctaaattgtaatgttactgaaccatccaattatagatctattaaaaagttagatatttggcttaaaaaaagaaaaattgtaggtatttatggcttagatactagaattataactaattatataagagatataggggcccctaaaggaacaatacaatttttaaaaaaaggaaatcataactttaaagatcttttaaataaagcaagatcctggaatggccttgaaggattagatttagctaaaaaagtaacttgtaataaaccttataaatggaagtctttaaagacctgggataaaaataaaggttatacaaaaaataaaaaaaataagtacaaaatcattgcaattgattacggcattaaaaaaaatcaattaagatgtttttcagatattgattgtagtgttactgttgttccggctaatttttctgctgaaaaaattataaaacttaaaccagatggagtatttttatcaaatggtc

SEQ ID NO: 318868 - DNA, 157 bp, Unknown
  Bacterial polypeptide expressing nucleotide sequence isolated from the Sargasso Sea
gatgacacaatacaaggtattaaatttaagaaaaaaccattttttagttttcaaggccatcctgaagcatctccaggtccacaagatatggcttacatatttcttaactttataaataatatgaaaaaatacaaatgccaaaaagaaaagatataaa

SEQ ID NO: 318869 - DNA, 552 bp, Unknown
  Bacterial polypeptide expressing nucleotide sequence isolated from the Sargasso Sea
attgaacaaaaagcaaaaagtaaactcaaaaaatttttcacatttatcatcaggcgttttagttcttgaaaataaaacaatattcaaaggtattggtattggatatcaaggcacagctacaggagaagtttgtttcaacacttctttaacgggctatcaagaaattatatctgacccgtcttatgctgggcaaattattaattttacttttccacatattggaaatgttggtaccaatcaagaagaccacgagtcggacaaaatttggacaaaaggagttatttttaatacagaaataactaatccatcaaattacagatctttaaaaaaattagatgtctggttgaaaaaaaataaaattgttggaataactggtttggatactagaagcttaactaattttattagagacaaaggggcgccaaaaggtaccatttcaaataataataagggaacttttaatcttaaaaaattaactaatagctctattaaatggccaggattaaatggtcttgatttagcaaaaatagttacaaccaaaaaaaaatacat

SEQ ID NO: 318870 - DNA, 403 bp, Unknown
  Bacterial polypeptide expressing nucleotide sequence isolated from the Sargasso Sea
tttgagacaggtcagaaacaaaaaaaataaatcacataatttttcaacaggtattttagtttttgaagatggcactaagttttttggaacaggtattggccatgagggaagtgccgttggtgaagtttgtttcaacacttcaataactggttaccaagagataataacagatccgtcttactcagatcaaatcataaatttcacatttccccacattggtaatgttggaacaaatattgaagataacgaggctgataaaacctgggcaaaaggagttattcttaattccaatataacggagccatctaattatagatcaattaaaaaattagataaatggcttaaaaaaagaaaagttattggaatagtgggattagacactagagttattacaaactatata

SEQ ID NO: 318871 - DNA, 760 bp, Unknown
  Bacterial polypeptide expressing nucleotide sequence isolated from the Sargasso Sea
ttgaacaaaaaacaaaaagtaaactcaaaaaaaaaatcaaattttagcccgggtattttagttcttgaaaataaatcaatttttaatggaattggtattgggtatgaaggtactgctacaggagaggtttgtttcaatacttcaataacaggttatcaagaaataatttcagatccatcatatgcgggacaaattattaattttacttttccccacattggtaatgttggaactaacaagcaagataatgagtctgaaaaagtctggactagaggggtaatatttaattcagagattactaacccttcaaactatagatcactcattgagttagatttgtggctccgaaaaaataagattgttggtctaattggtttagataccagaagtttaacaaacctaataagagacaagggagcgccaagaggaacaatttctcacaaaaaaaaaggtgtttttccagtaaaaaaacttattaataaaacattaaaatggccaggtcttaacggtctcgatttagcgaaaacggtttctactaaaaataaatttacttggcaggggttacaaacttggacaaaaaaagatggttttaaaaaaataaaaaaaaagaaatttagaatagtcgcaattgattatggaataaaaacaaacattttaagatatttttcaaatttttattgtgatgtagtggttgtgccatgcgatgcctcagctgaatatatcatgacacttaaaccaagtggaaatttttttgtcaaac

SEQ ID NO: 318872 - DNA, 172 bp, Unknown
  Bacterial polypeptide expressing nucleotide sequence isolated from the Sargasso Sea
cacatataaatccttatttgataatagtattgaaggtatcaaactaaaaaataagccagtcttttcagttcaatatcatccagagtctaatccaggacctcaagatagtgtctatttgtttcaagaatttattaacaacatgaaaaaaaatgccaaaaagaaaagatattaa

SEQ ID NO: 318873 - DNA, 433 bp, Unknown
  Bacterial polypeptide expressing nucleotide sequence isolated from the Sargasso Sea
attgatcaaaaaagcaaaaaaaactaactcaaaaaaaatctcagataaacaaacaggcattttagttcttgaaaacagaaaagtttttaaaggtattggtattggctaccaaggaactgctactggagaagtttgcttcaacacctctcttacaggttatcaagaaataatttctgatccttcttatgctggacaaataatcaattttacctttcctcatattggtaatgtgggtaccaataatgaagaccatgagtctgataaaatttggacaaaaggtgttatatttaattcagaaataacttcaccttcaaattatagatcttttttacacctagatgcttggttgaaaaaaaataaaatagttggaattactggattagacactagaaatttgactaattttattagagataaagggcaccaaaaggca

SEQ ID NO: 318874 - DNA, 334 bp, Unknown
  Bacterial polypeptide expressing nucleotide sequence isolated from the Sargasso Sea
attgatcaaaaaagtaaaaaaagctcacttaaaaaattctcaaaaaaacactggtattttagttttagaaaataaaaaaattttcagaggtatcgggattggacaccagggagaggctactggtgaagtttgctttaacacctcattaacaggataccaagaaataatatcggatccatcttatgctgggcaaataataaattttacctttcctcacattggaaatgtagggacaaaccaagaggatttcgagtctgataagatatggactaaaggggttatttttaattctgagataacatcaccatcaaactatagatcttttcaacattta

SEQ ID NO: 318875 - DNA, 124 bp, Unknown
  Bacterial polypeptide expressing nucleotide sequence isolated from the Sargasso Sea
gatgattaatccatataagaaaaacgcgaaattagttttaagtaatggaattgttttcccaggattcttttttggtgcttctggtacagctattggtgaaatagtttttaatacgggaatgacc

SEQ ID NO: 318876 - DNA, 373 bp, Unknown
  Bacterial polypeptide expressing nucleotide sequence isolated from the Sargasso Sea
tttgagacagattagaaacaaaaaaaaaaataattcacataatttttcaacaggtattttagtttttgaggatggcactagattttttggcaaaggtattggctatgaaggaagtgcggttggagaggtttgttttaatacttccataacaggttatcaagaaattattacagacccatcttattcagatcaaattataaattttacttttccccatataggtaatgtcggtacaaacccagaagataacgaggcagataaagcttgggcaaaaggcattattcttaatagcaacataacagaaccatcaaactatagatcaataaaaaaactagatgtttggcttaaaaaagaaaaattgttggtattgtaa

SEQ ID NO: 318877 - DNA, 733 bp, Unknown
  Bacterial polypeptide expressing nucleotide sequence isolated from the Sargasso Sea
ttgaacaaaaagcaaaaactaaactcagcaaatttttcacatttatcgtctggcattttagttcttgaaaataaaacaatatttaaaggtattggtatcggttaccaaggaactgcaacaggagaagtttgcttcaatacttctttaacaggttatcaagaaattatatctgatccatcttacgctggacaaattattaattttacttttccacatattgggaatgttggtactaacagagaagatcatgagtcagacaagatttgggctaaaggagttatttttaataccgaaataactaatccatcaaactatagatctttaaaaaaattggatagttggttgaaaaaaaataagatagtaggaataaccggactagacactagaagcttaactaattttataagagacaaaggagcacctaaaggcaccatttctaataataataaaggtatttttaatctaagaaaattaaccaatagctctattaagtggccaggattaaacggccttgatttggcaaaaatagttacaactaaaaaaaaatatttatggaaaggtttcaaaacatggaaaaaagaaaaaggctttgaaaaaaacaaaaagaagaaatataaaattatagcaatcgattatggaattaaaaaaaatattttaagatatttttctaattttaattgtgaagtaattgtagttccttgtagccatgaagctgaagagattattaaattaa

SEQ ID NO: 318878 - DNA, 120 bp, Unknown
  Bacterial polypeptide expressing nucleotide sequence isolated from the Sargasso Sea
aaccagtcttttcagttcaatatcatccggagtctaatccgggacctcaagatagtgtttatttgtttgaagaatttattaacaacatgaaaaaaaatgccaaaaagaaaagatattaag

SEQ ID NO: 318879 - DNA, 676 bp, Unknown
  Bacterial polypeptide expressing nucleotide sequence isolated from the Sargasso Sea
atgattgtacatcaacctcgctcaagcacaggtgacgtaggactaaaattacgagacagaggttatgaactggatgttcgccgtccagtcattggtgaaaaactgcccgactcgatgaatgaccatgatgtagcagtgatttatggtgggccaccaagtgctaatgataatttagattatatcaaacttgaaatcgattggattacagttgccttagagtcaaaaaaacctttgctaggcatatgtcttggagctcagatgcttacaaaaaatttaggtggaactgttcagcgtgccaaggatcaacaatttgaaattggattttatgacttacaaccaactggagatggtcataaaatatttcaaaatcaaaaaacattttttcaatggcataaagagggctttaaggttccaaaagaatgcgatgtccttgcttacggtgagacatttccgcaacaagcatttaagtataaaaatgcagtgggtattcaatttcaccctgaagtaaatcttaaaatgcatttgcgatggttgtattatgcgggttacatgttaagagaaaaaggggctcaaaaacgtcaatatcaaatgcatcaaagacttagtcatggtaaaaaaatcaatatgtggttagactcttttttagataattattttcttatagataaatcatgaa

SEQ ID NO: 318880 - DNA, 496 bp, Unknown
  Bacterial polypeptide expressing nucleotide sequence isolated from the Sargasso Sea
attgaaagaaaaacataaaaataaaattgcaattaaatcaaaatatccaacagctattttagttttagaaaataaaacagtattaaaagggataggacttggttataatggtgaggcaaccggggaaatttgttttaatacatctttaactggttatcaggaaattatatcagacccatcttatgcaggacaaataattaattttacttttcctcatattggaaatgttggaacaaataatgaagatatagaatcagatataatttggaccagaggggtgatatttaattcagaaataacaaatccttcaaattatagatcattaaaacatttagatgattggcttaaaaaaaataaaattgtgggcattacagggcttgatactagaagtttgaccaactttatcagagataaaggcgctcccaaaggcactatttcaaataataaatctggtaaatttaatataaaaaaactcattaaaaaaacaactattttg

SEQ ID NO: 318881 - DNA, 455 bp, Unknown
  Bacterial polypeptide expressing nucleotide sequence isolated from the Sargasso Sea
attgactttaaaacgaaaaaacaaatcttcacatctctcgaattttaacacagctattttagttctagaaaataaatcagtctttaaaggtatcggactaggatataaaggagaggcaactggcgaagtatgctttaatacctcattaactggttatcaagaaataatatctgacccatcttatgctggtcagataataaattttacatttccacacattgggaatgttgggaccaacaaagaagacgtagagtctgataaaatttggacgagaggtgttatttttaattcagaaataacaagtccatctaattatagatctcttcagaatttagataaatggcttaaaaaaaataaaatagtaggcataactggtctcgatacaagaagtttaacaaattttattagagataagggagctccaaaggaaacatatcaaacaacaaaatggaaaa

SEQ ID NO: 318882 - DNA, 576 bp, Unknown
  Bacterial polypeptide expressing nucleotide sequence isolated from the Sargasso Sea
attgaacaatggtcattatttttttggaaagggtttcggttatcacggaaacttccttggtgagatttgttttaacacgtcaatcaccggttatcaggagattcttactgatccatcttattttaaacaaattatcaccttcacttttcctcatattggtatagtaggttcaaataaagttgacgtagaaagttcaaaaatatttgcatcggcttgcataataaataatgagcttactccctcctccaattttaggtcagaaaaagattttgagagttggcttaaaataaataaaaaagcctgcatcacagggattgataccagatcattaacaaaaataattagagataaaggtgcatgtaacgcattaattcatttcccaaaaaacagattaaaaaagattgagtatctaaaaaaagaattaaaaaattttccctctatgaaaaatactgatttagcttcagaggtttcaacaaaatatatttataaatgggacaaaaataaaaaaatccctttaaattttgagaatattaaaggcaaatttatagctgttttagactacggaattaaaaataa

SEQ ID NO: 318883 - DNA, 553 bp, Unknown
  Bacterial polypeptide expressing nucleotide sequence isolated from the Sargasso Sea
attgaaagaaaaacataaaaataaaattgcaattaaatcaaaatttccatcagctattttagttttagataataaaacaatatttaagggtaccggtctaggatatcaaggagaagcaaccggagaagtttgttttaatacatctttaacaggttatcaggagataatatcggacccatcttatgctgggcaaataattaactttacttttcctcatataggaaatgttggaactaacaatgaagatgtagagtcagataaaatttggacaagaggtgtaatttttaattcggaaataacaaatccttctaattacagatctcttaaacatttaaatgaatggctcaaaaagaataaaatagttggaataactggtcttgatacgagaagtttaactaattttattcgagataaaggagctcctaaaggaacaatttcaaataataaatcaggaaaatttaatattaagaagctggtcaaaaaaacaatttcatggccaggcttaaatggaatggatcttgctgaagaagtatcaacgaaaaaaaattatacc

SEQ ID NO: 318884 - DNA, 667 bp, Unknown
  Bacterial polypeptide expressing nucleotide sequence isolated from the Sargasso Sea
aatgacttacaaaaaaaggaaaaaaggactcgtactgttagctgatggtacgattttttatggtcgttcatccggaatcaatggtacttcttttggtgaaatctgtttcaatactggagtaactggatatcaagaaatatttactgatccatcttattttggacaaattatggtgactacaacttctcatattggaaactacggtatcaaaatgtctgaatctcaatcaaataaaatttatatcagtggactaatttgtaaaaattttagcgctataaactcaagatcaaactctgaatcaattaaaaaatggtttgaatcaaataaactagttactttatgtgatgttgacactagagctcttgtaagatatataagagataatggtgcaatgaatgctgctataactacagaagttgacaaaatttcagatatcaagaaaaaacttagcaattttccaagtatgaatggattagaacttgcatctaaagtttcgacaaaagaaccttatgaaattggaaataaacaatccaataaaagattagcagtagttgacttgggaattaaaaaaaatatacttgataattttgttaaaagagatctgtttgttaaagtttttccatatgatacaagtcttgacgaaatgctaaaatttaaacctaatgga

SEQ ID NO: 318885 - DNA, 658 bp, Unknown
  Bacterial polypeptide expressing nucleotide sequence isolated from the Sargasso Sea
ttgaataatggtcatcattttttggggaagggtttcggttatcacggaaacttctttggtgaaatttgttttaatacatcaattactggttatcaggagattctcactgatccctcttattttaaacaaattataacctttacttttcctcatattggaatagtaggaactaataaagtagatattgaaagttctaaaatatatgcatcagcttgtataataaataatgagctaaccccatcttcaaattttagatcagaaaaaaattttgagaattggcttaaaaaaaataaaaaagcatgtattacgggtattgataccagattacttacaaaaataattagagataaaggagcttgtaatgcacttattcatttcccaagaaaaaatttaaaaaaaattgattatttaaaaaatgaattaactagttttccttctatgaaaaacactgacttagcctctgaagtttcaacaaagtatatctacaagtgggataataataaaaagatacctgtagattttaaagatattaaaggtaagttcatagctgttttagattatggaataaaaaataatattcttaaaattctaaatcaaagtaaatatcaaattattgtttttccacataattacaaaatagaaaagattttaaataaga

SEQ ID NO: 318886 - DNA, 391 bp, Unknown
  Bacterial polypeptide expressing nucleotide sequence isolated from the Sargasso Sea
ttgatcaaaaaagtaaaaaaaactaactcaaaaataaaatctcaaatcaacacaggcgttttagttcttgaaaacaaaaaggtatttaaaggaattggaattggttaccaaggagaagctacaggcgaagtttgctttaatacatcgttgactggttatcaagaaatcatctccgatccatcatacgcaggtcaaattattaactttacctttcctcatattggaaatgttgggactaataaagaagatcatgaatctgataagttatgggctagaggagtgatttttaactctgaaataacttcaccctcaaactatagatcattccaacatttagatgcttggcttaaaaaaaataaaattgttggaattactggcttagacactagaa

SEQ ID NO: 318887 - DNA, 178 bp, Unknown
  Bacterial polypeptide expressing nucleotide sequence isolated from the Sargasso Sea
tgagattacacataaatctttatttgataatagtatagaaggaattagactaaaaaataaccctgtgttctcagttcaatatcacccagagtcaaaccctgggccacaagatagtgtttatttatttaaaaaatttgtcaacaacatgaaaaaaaatgccaaaaagaaaagatcttaa

SEQ ID NO: 318888 - DNA, 682 bp, Unknown
  Bacterial polypeptide expressing nucleotide sequence isolated from the Sargasso Sea
actgaataatggtcatcatttttttggaaagggtttcggttatcacggaaacttctttggcgaaatttgttttaatacatcaattactggatatcaggaaattcttactgatccctcttattataaacaaattataacctttacttttcctcatataggaatagtaggaacaaataaaatagatattgaaagttccaaaatatatgcatcagcttgtataataaataatgagctaactccctcttcaaactttagatcagaaaaaaattttgagaattggttaaaaaaaaataaaaaggcatgtattacgggcattgatactagattacttacaaaaataattagagatgaaggagcttgtaatgctcttattcatttcccaagaaaaaatttaaaaaaaattgattatttaaaaaatgaattaaatagttttccttctatgaaaaatactgacttagcctctgaagtatcaacgaaatatatctacaagtgggataataataaaaagataccaatcaattttgatagtattaaaggtaaatttatagctgttttagactatggaatcaaaaacaatattcttaaaattctaaatcaaagtaaatatcaaattattgtttttccatacaacttcaaaataaaaaaaattttaaataaaaatacagttgggttttttttatcc

SEQ ID NO: 318889 - DNA, 583 bp, Unknown
  Bacterial polypeptide expressing nucleotide sequence isolated from the Sargasso Sea
ttgtcatcaggcgttttagttctcgaaaataaaacaatatttaaaggtattggtattggatatcaaggaacagccactggagaagtttgcttcaatacttctttaacaggttatcaagaaattatatccgacccatcgtatgctggacaaattattaattttacttttcctcatattggaaatgttgggactaacaaagaagatcatgagtcagacaaaatttggaccaaaggtgttatttttaacactgaaataactaatccttctaactacagatctttaaaaaaattggatagttggttgaaaaaaaataagataatagggataactgggctagacactagaagcttaactaattttataagagacaaaggagcgcctaaaggtactatttctaataataataaaggtatttttaatctaaaaaaattaacaaatagcgctattaaatggccaggattgaatggcttggatttagcaaaaactgttacagcaaaaaaacaatatatatggaaaggtttcaaaacatggaaaaaagataaaggtttgaaaaaaataaaaagaagaaatataaaattatgca

SEQ ID NO: 318890 - DNA, 262 bp, Unknown
  Bacterial polypeptide expressing nucleotide sequence isolated from the Sargasso Sea
ttgaacaaaaagcaaaaagtaaactcaaaaaaattctcacatttatcatcaggcgttttagttctagaaaataaaacaatatttaaaggtattggtattggatatcaaggaacagccactggagaagtttgcttcaatacttctttaacaggttatcaagaaattatatccgacccatcttatgctggacaaattataaattttacttttcctcatattggaaatgttggaactaacaaagaagatcacgagtcagacaaaa

SEQ ID NO: 318891 - DNA, 139 bp, Unknown
  Bacterial polypeptide expressing nucleotide sequence isolated from the Sargasso Sea
atgaagtttgatgtaaaactactacttgagaatggaatttcattcgagggtattggttttggataccaaaaaataggtgttggagaagttgtttttaacactgccatcacaggctaccaagaaatactaccgacccatc

SEQ ID NO: 318892 - DNA, 430 bp, Unknown
  Bacterial polypeptide expressing nucleotide sequence isolated from the Sargasso Sea
attgatcaaaaaacaaaaaaataaaattgcaattaatcatccatttaatacgggtattttagttctagataataaactaattttcaaaggtattggccttggatatcaaggtacagcaaccggagaggtttgttttaatacttctttgactggatatcaggaaataatatctgacccttcatatgctggacaaattatcaactttacattccctcatattggaaatgttggaaccaacaatgaggatttggagtcagacaaagtttgggcaaagggtgctatatttaattctgagattacttctccctcgaattacagggctttaagaacattagatgagtggcttaaagaaaataaaatagtcggtttaactggattagacactagaagtttaacaaattttataagagataaaggcgctccaaaaggg

SEQ ID NO: 318893 - DNA, 760 bp, Unknown
  Bacterial polypeptide expressing nucleotide sequence isolated from the Sargasso Sea
tttgacaggtattttagtttttgaagatggaacaaaattctatggtaacggtttaggttttgagggaagtgcaattggagaagtatgtttcaatacttcaattacaggatatcaagaaataataactgatccatcttattcagatcagataataaattttacatttcctcatattggtaacgtaggaacaaatttagaggataatgaatcagataaagtatgggcaaaaggtgttattctcaattgtgatattacagagccatctaattacagatcgattaaaaagttagatatttggcttaaaaaaagaaaaattgtaggtatttttggcttagataccagagttataactaattacataagagatataggagcacccaaaggaacaatacagtttttaaaaaaaggaaatcataactttaaagatcttttaaacaaggcaagatcttggagcggcttagaaggattagacttagctaaaaaagttacttgcaaaaaactttataaatggaagtcgttaaagtcctgggacaaaaataaaggctatgttaaaagtaaaaaaaataagcacaaagtcattgctattgattatggcattaaaaaaaatcaattaagatgtttttcagattttgattgcagtgttacagttgttccagctaactttcctgcagaagaaataataaaactcaaacctgatggagttttttatcaaatggtcctggagacccggcagcaactggcaaatatgctataccaataa

SEQ ID NO: 318894 - DNA, 546 bp, Unknown
  Bacterial polypeptide expressing nucleotide sequence isolated from the Sargasso Sea
attgaaagaaaaacaaaaaaataaaattgcacttaaatccaaatttccagcagctattttagttttagataataaaacaatatttagaggtataggccttggttatcaaggtgaggcaactggagaggtctgttttaatacctctttaacaggatatcaggaaattatatctgacccatcttatgcaggacagataattaactttacttttccccacattggaaatgttgggactaataatgaagatatagagtcggacaaaatttggacaagaggagtaatttttaattctgaaataacaaatccatccaactatagatctttaaaacatttagatgaatggcttaaaaaaaataaaattgtgggtattacaggacttgatactagaagtttaactaactttataagagataaaggtgctccaaaaggcactattgcaaacaataaatcaggtaaatttaatattaaaaaactcattaaaaaaactacaatttggcctggtttaaaaggaatgggatctgcacaggaagtatcaactaaaaaaaa

SEQ ID NO: 318895 - DNA, 269 bp, Unknown
  Bacterial polypeptide expressing nucleotide sequence isolated from the Sargasso Sea
tcctgtcaaaaatttagtccatgataaagttgaaatcactagccaaaatcatggttttgtggtggttgaagaagctttaccaaaagaaattgaagtaactcataaatctctttttgataataccatagaaggaataagacttaaaaacaggccaatattttcagtacaatatcatccagaatcaaaccctgggccacaggatagtgtttacttgtttcaagaatttattaacaacatgaaaaaaaatgccaaaaagaaaagatattaaa

SEQ ID NO: 318896 - DNA, 330 bp, Unknown
  Bacterial polypeptide expressing nucleotide sequence isolated from the Sargasso Sea
tttgagacagattgaaaaaaaagaaaaaaataattcacataatttttcaacaggtattttagtttttgaagatggcactaatttttatggcaaaggtataggctacgagggttacgcaattggagaagtttgctttaatacctcaataactggttatcaagaaataataacagacccttcatattcggatcaaattattaactttacttttccgcacataggaaatgttggtactaatcctgaggataacgaagctgataaagcttgggtaaaaggtgtgatatttaactcaaacgtaactaatccatcaaactatagatctataaaaaa

SEQ ID NO: 318897 - DNA, 118 bp, Unknown
  Bacterial polypeptide expressing nucleotide sequence isolated from the Sargasso Sea
agtattgataattctgttttttctgttcaataccatccagagtcaagccctggaccacatgatagtaggtatttgtttcaaaaatttattgagatgatgaatgcccaaaaggactgat

SEQ ID NO: 318898 - DNA, 508 bp, Unknown
  Bacterial polypeptide expressing nucleotide sequence isolated from the Sargasso Sea
ttgatcaaaaaagcaaaaaaaacaaactcaaaaaattcacagattaatacaggcgttttagttcttgaaaacaaaaaggtttttaaagggattgggattggctatcaaggagaagcaactggagaagtttgctttaatacctctttaaccggttaccaagagataatttcagatccatcttacgcaggtcagattataaattttacgtttccacatattggaaatgtcggaactaataaagaagatgtcgagtctgataaagtctcgacaaaaggagtaatctttaattcagaaataacttctccttcaaattatagagcatttctacatttagatgcctggctcaaaacaaataaaattgtaggaattacaggtctggatactcgaagtttaacaaactttattagagataaaggcgcacctaagggaacaattgcttactcaaaaaatggaaaatttaatgttagcaagttaacaaattcaactattagatggagtggtttaaaaa

SEQ ID NO: 318899 - DNA, 205 bp, Unknown
  Bacterial polypeptide expressing nucleotide sequence isolated from the Sargasso Sea
aaatcaattcctaaaaatgtaaaagtcacacacaaatctctttttgatgggtctattgagggaattgaagtgaaaagtaaaaaattattttcagttcaatatcacccagaagctaatcctggaccgcaagatagcaaatatttatttgaaaaatttttaaaaattattaaatcaaaaaaaaatgggaaaaagaagagatattaaa

SEQ ID NO: 318900 - DNA, 156 bp, Unknown
  Bacterial polypeptide expressing nucleotide sequence isolated from the Sargasso Sea
tatcattatttgataagtcccttcaaggtatacaattcaaggatttgcctgcttttagcttccaaggacatcctgaggcaagtccaggccctcaagaaatacaaacactttttaataaatttagtttaatgattaaagaatatgccaagacgtgaa

SEQ ID NO: 318901 - DNA, 323 bp, Unknown
  Bacterial polypeptide expressing nucleotide sequence isolated from the Sargasso Sea
gatcctggctttggccttgaactgcaatacctacaaactcaaatgcggacatcatggagggaatcatcctgtaatggattaccagaccaacaagattgagatcacaagccataatcatggattctctgtggacgaaaacagtcttccggaagacgtcagagtgacccacaggaatcttaacgatcagacggttgaaggtctggaatcacttcaataccccgcctattccgttcaataccaccccgaggcggcaccgggtccgagggatgcccgttatctattcaaacgatttgttgagatgatgggaaacaccaaacgttgaa

SEQ ID NO: 318902 - DNA, 613 bp, Unknown
  Bacterial polypeptide expressing nucleotide sequence isolated from the Sargasso Sea
attgatcaaaaaagcaaaaaaaactaactcaaaaataaaatctcaaattaatacaggcgttttagttcttgaaaacaaaaaggtatttaaaggaattggaattgggtaccaaggagaggccacaggtgaagtttgctttaatacatcattaactggttatcaagaaatcatctccgatccatcatacgcaggtcaaataattaactttacctttcctcatattggaaatgttggaactaataaagaggatcatgagtctgataaaatatgggcaagaggagtaatatttaactcagaaataacttcaccatcaaattatagatccttcctacatttagatgcttggcttaagaaaaataaaattgttggaattactggcttagacactaggagtttaacaaactttataagggacaaaggtgccccaaaaggtacaattagttactcaaagaaaagaaaatttaatattaataaattgactaataccaccataaaatggagtggattaaaaaatcttgatcttgcagaagttgtttcaactcagaaaaattatatttggaaaggtcttaaaacttggaaaaaagaatttggatataaaaaaaataataagaac

SEQ ID NO: 318903 - DNA, 595 bp, Unknown
  Bacterial polypeptide expressing nucleotide sequence isolated from the Sargasso Sea
atgacttacaaaaaaaggaaaaaaggactcgtactgctagctgatggtacgattttttatggtcgttcttccggaatcaatggcacttcttttggtgaaatttgtttcaatacaggagtaactggatatcaagaaatatttactgatccatcttattttggacaaattatggtaactacaacttctcatattggaaactacggtatcaaaatgtctgaatctcaatcaaataaaatttatatcagtggactaatttgtaaaaattttagtgctataaactcaagatcaaactctgaatcaattaaaaaatggtttgaatcaaataaactagttactttatgtgatgttgacactagagctcttgtaagatatataagagataatggtgcaatgaatgctgctataacttcagaagttgacaaaatttcagatatcaagaaaaaacttagcaattttccaagtatgaatggattagaacttgcatctaaagtttctacaaaagaaacttatgaaattggaaataaacgatccaataaaaggctagcagtacttgacttgggaattaaaaaaaatatacttgataattttgttaaaa

SEQ ID NO: 318904 - DNA, 736 bp, Unknown
  Bacterial polypeptide expressing nucleotide sequence isolated from the Sargasso Sea
ttgaacaaaaaagcaaaaaaaactaactcaaaaacaaaatctcaaatcaatacaggcattttagttcttgaaaataaaaaggtatttaaaggaattggaattggataccagggagaagctaccggtgaagtttgctttaatacatccttaacagggtatcaggaaatcatttctgatccctcatatgcgggtcaaattattaactttacatttcctcatataggaaatgttggaactaataaagaagatcatgaatccgataaaatatgggcaagaggagtaattattaactctgaaataactacaccctcaaactatagatcttttctacatttagatgcttggctaaagaaaaataaaattgttggaattacaggtttagatacaagaagccttacaaactttataagagataaaggggctcctaagggaacaatatcttataaaaaaaatggaaaatttaatattaataaactaactaataatacaatcagatggagtggattaaaaaatttagatcttgcacaggtagtttcgactaataaaaattatacttggagaggtcttcaaacctggaaaaaaaatataggatataaaaaaaacaataaaaattcatttcatgtagttgcagttgattatggaataaaaaaaaatatattaagatatttctctgacttcaactgcaaggttactgttgtttcttgcaaaacaaatgctcaaaaaatactaagttgaa

SEQ ID NO: 318905 - DNA, 159 bp, Unknown
  Bacterial polypeptide expressing nucleotide sequence isolated from the Sargasso Sea
tatttgatggttgtatcgaaggaataaaactaaaaaataaaccagttttttccgttcaatatcatccggaatctaatcctgggccccaagatagtatctatttatttcaagaatttattaacaatattaaaaaaaatgccaaaaagaaaagatattaaa

SEQ ID NO: 318906 - DNA, 134 bp, Unknown
  Bacterial polypeptide expressing nucleotide sequence isolated from the Sargasso Sea
tcaaggcattgaatttatcgataggcccgcatttagtttccaaggacatcctgaggcgagtcctggcccacaagagatacagatactttttgaaaaatttagttctatggtaaaagagtatgccaaaacgtaaa

SEQ ID NO: 318907 - DNA, 511 bp, Unknown
  Bacterial polypeptide expressing nucleotide sequence isolated from the Sargasso Sea
attggaattagaaaatgaaaatgaagaattatgtgacagtacgtttacacatgacccatctattgtcattaatgatggcgccataattttaaatatggggaaaaaattaagaaaaaaagaagcatatgaacatttaaaattatatcaatcaattgatgtgccaattttaggtaaaataataaatgacggcacagttgaaggaggtgattgtttatggataaacaaaaaaactttaattgtgggagaaagtgatagaaccaataaatcaggaataaatcaattatcagaaatattggaaaatcatggtttaaaagttatttctgtaaagattccaaaatacaatgatttagattcatgttttcatctgatgtctatgatttcattattagatgaagacttagcaatagctaaagtggatatgttaccaaataatttaattgatatatttaaggaatacaaaataaaattaataaatattcctgataacgattataaaaaaagtaaaacttta

SEQ ID NO: 318908 - DNA, 139 bp, Unknown
  Bacterial polypeptide expressing nucleotide sequence isolated from the Sargasso Sea
tcaaacggttgaaggtctggaatcgcttcagtactccgcttattccgttcaataccatcccgaggcggcaccaggcccgcgggatgcccgttatctcttcaaacggtttgttgagatgatgggaaacaccaagcgttaa

SEQ ID NO: 318909 - DNA, 748 bp, Unknown
  Bacterial polypeptide expressing nucleotide sequence isolated from the Sargasso Sea
ttgatcaaaaaagtaaataaagctcactcaaaaaattctcaaaaaaacacaggtattttagttttagaaaacaaaaaaatttttaggggtattggaattggatatcagggagaagcaactggtgaagtttgctttaatacctcattaacggggtaccaagaaataatatcagatccttcttatgcaggacaaataataaactttaccttccctcatattggaaatgtaggtacaaacaaagaagattttgaatctgacaaaatatggactaaaggagttatttttaattctgagataacatcaccatcgaattatagatcttttcaacatttagatgcttggttaaaaaaaaataagatagttggaattactggacttgatacaagaagtttaacgaattttattagagataaaggtgctccaaaaggaaccattgcttactcaaagaaaagtaaatttcatatcaacaaactaattaattctacgatcaaatggagtgggctaaaaaatttagatttagcagaaaaagttaccacacaaaaaaattatatttggaaaggacttaaaacttggagaaaagaatatggttttagaaaaaataatcaaaattcatttcatgtagtcgccatagattatggaataaaaaaaaatattttgagatatttttctgattttaaatgtaaagttaccgtagtttcttgtaaaacacctgcggaaaaaattttatctcttaaacctgatggtgtct

SEQ ID NO: 318910 - DNA, 610 bp, Unknown
  Bacterial polypeptide expressing nucleotide sequence isolated from the Sargasso Sea
attgacaaagaatataaaagtaaagtatacaaattcattcaatttttcttcgggtattttagtccttgaaaacggtttagttttgaggggtattggtcttgggtatcaaggaactacaactggtgaagtttgctttaatacgtctttaaccggttatcaggagattatatctgacccatcttatgcaggacaaattataaattttacattcccacatattggtaatgttggtgcaaatagtgaagatattgaatctgataaaatttggacacgcggtgtaatttttaattcagaaattactagcccatcaaattacagatctttaaaaaatttagatgaatggttaaaaataaataaaattattggaattaccggacttgatacgagaagcttaaccaatctaataagagataacggagcaccgaaaggaacaatttcctataacaagaaaggaaaatttaacataaaaaaattattaaaaaattcaatcaagtggcctggactagatggtctagatcttgcaagtgtagtctcaaccaaaagaaattataaatggataggtttaagaacatggaaaaaaaatattggttacaaaaaaaataaaaaaaaa

SEQ ID NO: 318911 - DNA, 370 bp, Unknown
  Bacterial polypeptide expressing nucleotide sequence isolated from the Sargasso Sea
tttgaagaagattggtcaaaatataaactctaaaaaaaatcttaaaaagatcaaacccactgctattttaatcctacaaaacggtaagttttttcaaggtgtaggtttgggctacaagggtactgcaactggtgaagtatgttttaatacttcaattactggttaccaagaaataatttctgatccttcttatgcagatcaaattattaactttacttttcctcacataggtaatgtaggagcaaataaagaggatcacgagtctgataaaatatggactaagggagtaattataaatactgaaataacaaatccatcaaattacagatccttgaaacatttagatcaatggttgaaaaaaaataaaata

SEQ ID NO: 318912 - DNA, 463 bp, Unknown
  Bacterial polypeptide expressing nucleotide sequence isolated from the Sargasso Sea
atgtcgtttcctgccattttagttttagaagatggtacggttattgaaggcactgggttcggtgcaacaaagccatcagtcggtgaacttgtttttaatacctcaatgtcaggttatcaagagattattaccgatccatcatatgctaaacaaataatagcttttacccatccccatattggaaataccggaattaatgatgaggacaatgaatctcatagcatttttgcttctggaatcgtcattaaagacttacccgatcattttagtaattggcgagcaacgcaatctctcaataccttccttgaatcaaaggaaaccattggaatttccaatattgatactagagaattaactgcaaagttaagagatcatggatcattaaaagcatgcattgctcccgaggatcaagattctttattaatcgcccaagaagctctgaatcaatttagtggattagaag

SEQ ID NO: 318913 - DNA, 703 bp, Unknown
  Bacterial polypeptide expressing nucleotide sequence isolated from the Sargasso Sea
ttagttcttgaaaataaatcaatttttaatggaataggtatcggatatgagggaacagctactggtgaagtatgctttaatacttcaataaccggttatcaagaaataatttctgatccttcttacgctggtcaaataattaattttacttttcctcacattggtaatgtcggaactaacaaacaagataatgagtcagataaagtttggacaaaaggagttatttttaattctgagataactgatccttcaaattatagatcgtatatggaattagacttatggttaaagaaaaataaaattattgggcttacaggtctagatacaagaagtttaactaacttcataagagatgaaggtgctccgagaggaactatttctcattctaaaaatggaaaatttaatattaaaaaacttataaattttactctaaaatggccaggtctgaatggattggatttggcaaaaacagtttctacaaaaaaaaaatacatatggaaggggctaaaaacttggaataaggagcaaggttataaaaaaattaaaaagaaaaaaattaagattgttgcaatagattatggaattaaaacaaacattttaagatatttttcaaacttttcctgtgatgttactattgttccttgtcaaactacattagaagaaattctaaaaataaaacctagtggagtttttttatctaatg

SEQ ID NO: 318914 - DNA, 691 bp, Unknown
  Bacterial polypeptide expressing nucleotide sequence isolated from the Sargasso Sea
attgatcaaaaaagttaaaaaaactaactcaaaaaaaaatacacatattcaaacaggcgttttagttctcgaaaataaaacaatatttaaaggtatcggtattggtcacgtgggaacagcaacaggagaggtttgctttaatacttctttaacaggctatcaagaaataatatctgatccttcttacgcaggacaaattattaattttacttttccacatattgggaatgttggcactaataaagaagatcatgagtcagatcagatttggacgaaaggggtaatttttaatacagaaataactaatccttcaaattataggtcattaaaaaaattagatacatggttaaaaaaaaataaaattgtaggaataactggacttgatactagaagcttaactaattttattagagacaaaggtgcacctaaaggtaccatttctaataataataaaggtatttttaatttaaaaaaattaactaatgactctattaaatggtcaggattaaatggtcttgatttagcaaaggtagttacaactaaaaaaaaatacgtatggaaaggttttaaaacttggaaaaaagataaagggtttgaaaaaaacaaaaagaaaaaatataaaattattgcaattgattatggaataaaaaaaaatattttaagatatttttcagactttaattgccaagta

SEQ ID NO: 318915 - DNA, 244 bp, Unknown
  Bacterial polypeptide expressing nucleotide sequence isolated from the Sargasso Sea
attgatcaaaaaacaaaaaaataaaattgcaattaatcatccattttctgcaggtattttagttctagataacaagctagttttcaaaggtattggccttggatatcaaggaacttcaactggagaggtttgttttaatacatctttaacaggatatcaggaaattatatcagacccatcttatgctggacaaattataaactttacatttcctcatattggaaatgttggaaccaataatgag

SEQ ID NO: 318916 - DNA, 539 bp, Unknown
  Bacterial polypeptide expressing nucleotide sequence isolated from the Sargasso Sea
attgatcaaaaaacgaaaaataaactcaacaaaaaattcaaaatttaccccaggcgttttagttcttgaaaatagacagatttttaaaggaatcggtattggttatgaaggcacagccacaggtgaagtttgctttaacacatccataactggttatcaggaaattatatctgatccttcctactcaggacaaattataaatttcactttcccacatattggaaatgttgggacaaataaagaagaccatgagtcagataaagtgtggacaaaaggcgttatttttaactcagaaattacaaacccttcaaattacagatcacttaaaaatttagatctatggttaaaaaaaaataaaatagtaggattaactggcttagatactagaagtttaactaattttattagagataagggtgcaccgaaaggcaccatctcaaacaataaaaagggtaattttaatttaaaaaaattaattattatttccacgaaatggcctggactcaatggtctcgatcttgcaaaaaatgtaactacac

SEQ ID NO: 318917 - DNA, 352 bp, Unknown
  Bacterial polypeptide expressing nucleotide sequence isolated from the Sargasso Sea
attgatcaaaaaagaaaacaaaattaactcaaaaaattctcaatttaatacaggtattttagttcttgaaaacaagaaagtttttaagggtattggaattggttttcaaggtgaggccactggtgaagtttgctttaatacttcattgactgggtaccaggaaattatatcagatccatcttatgctggacaaattataaactttactttccctcatattggaaatgttggaactaataatgaagactatgagtctgataaaatttggacaagaggagtaatttttaattctgaaataactacaccatcaaattatagatcttttcaacatttagatgcatggcttaaaata

SEQ ID NO: 318918 - DNA, 736 bp, Unknown
  Bacterial polypeptide expressing nucleotide sequence isolated from the Sargasso Sea
ttgaacaaaaagcaaaaagtaaactcaaaaaatttttcacatttatcgtcgggcgttttagttcttgaaaataaaacaatatttaaaggtattggtatcggatatcaaggaacagctacaggggaagtttgcttcaatacttctttaacaggctatcaagaaattatatccgatccatcttatgctggacaaattatcaattttacttttccacacatcggaaatgttggcactaacaaagaagatcatgagtcagacaagatttggacaaaaggagttatttttaatacagaaataactaacccatcaaattacagatccttaaaaaaattggatacttggctgaaaaaaaataaaattgtaggcataacaggattggatacgagaagcttaactaattttattagagacaaaggggctcccaaaggtactatttctaataataataagggtatttttaatctaaaaaaattaactaataactctattaaatggccaggattaaatggtcttgatttagcaaaaatagttacaaccaaaaaaaaatacatatggaaaggtttcaaaacatggaaaaaagagaaaggttttgaaaaaaacaaaaaaaagaaatacaaaattattgcaattgattatgggattaaaaaaaatattttgagatatttttctaattttaattgccaagtaattgttgttccctgcaaccttgaagctaaagatatcattagattaaaac

SEQ ID NO: 318919 - DNA, 402 bp, Unknown
  Bacterial polypeptide expressing nucleotide sequence isolated from the Sargasso Sea
attgactttaaaacgaaaaaacaaaacttcacatctctccaattttaacacagctattttagttcttgaaaataaatcagtctttaaagggattggactgggacatacaggagaggcaactggagaggtatgctttaatacatcattaactggttaccaagaaataatatctgatccatcgtatgcaggacagataataaattttacctttccacacattgggaacgttggggctaacaaagaagacatagagtctgataaaatatggacaagaggagttatttttaattcagagattacaagtccttcaaattataggtctcttcaaaatttagataagtggcttaaaaaaaataaaatagtaggcataaccggtcttgacactaggagtttaacaaattt

SEQ ID NO: 318920 - DNA, 709 bp, Unknown
  Bacterial polypeptide expressing nucleotide sequence isolated from the Sargasso Sea
ttgatcaaaaaagtaaaaaaagctcacttaaaaaattctcaaaaaaacactggtattttagttttagaaaataagaaaatttttagagggatcgggattggacaccagggtgaagcaactggtgaagtttgctttaatacctcattaacgggataccaagaaataatttcagatccatcttatgctggacaaataataaactttacctttcctcacattggaaatgtaggaacaaataaagaagatttcgaatctgatagaatttggactaaaggagttatttttaattctgaaattacatcgccatcaaattatagatcttttcaacatttagatacttggttaaaaaaaaataagataattggaattactggacttgatacaagaagtttaacgaattttataagagacaaaggtgctccaaaaggaaccattgcttactcaaataaaagtaaattccatattaacaaacttattaattctacgattaaatggagtggtctaaaaaatttagatctagcagaaaaagttaccactcaaaaaaattatgtttggaaaggacttaaaacctggagaaaagaacatggctatagaaaaaataatcaaaattcatttcatgtggtggctatagattatggaataaaaaaaaatattttgagatatttttctaattttaaatgtaaagttactgtagtttcttgcaaaacat

SEQ ID NO: 318921 - DNA, 271 bp, Unknown
  Bacterial polypeptide expressing nucleotide sequence isolated from the Sargasso Sea
cttttgggcaccatggtgcaaccatcctgttcacgacttaaaaaataatatagttttcattacttcacagaatcataactttgctgttgctgaaccaaataatagagatgatatcaatatcactcatagatctttatttgataactctattcaaggcatagagtataaagaaaaaccattctattcgattcaatgtcaccctgaagctagtcctggtccaaaagaattcgaaactttatttaaaagattttttgaggagatgaatgcctaa

SEQ ID NO: 318922 - DNA, 493 bp, Unknown
  Bacterial polypeptide expressing nucleotide sequence isolated from the Sargasso Sea
attgaagaaaaaagcaaaaaaaactaactcaaaaacaaaatcacaaatcaatacaggcattttagttcttgaaaataaaagggtatttaaaggaattggaattggataccaaggagaggctacaggcgaagtttgcttcaatacatcattaacaggatatcaggaaatcatttctgatccttcatatgcgggtcaaattattaactttacctttcctcatataggaaatgttgggaccaataaagaagatcatgagtctgataaaatatgggcaaaaggagtaataattaactcagaaatatcctcaccctcaaactatagatcttttctacatttggacgcttggcttaagaaaaataaaattgttggaattactggcttagacaccagaagccttacaaactttataagagataaaggggcacctaagggaacaatatcttatttaaaaaatggaaagtttaatattagtaaactaactaataatacaatt

SEQ ID NO: 318923 - DNA, 178 bp, Unknown
  Bacterial polypeptide expressing nucleotide sequence isolated from the Sargasso Sea
actcacaaatcactctttgatggatctatagaggaaatagaagttaaagaaaaaagattattttcggttcaatatcatccggaagctaatcctggtcctcaagatagcaaatatttatttgaaaaatttttaaataacattaggaaaagaaataatgggaaaaagaaaagatattaga

SEQ ID NO: 318924 - DNA, 739 bp, Unknown
  Bacterial polypeptide expressing nucleotide sequence isolated from the Sargasso Sea
ggttataaaggcacagtaactggggaagtgtgctttaatacatcaatcacgggttaccaagagataatatctgacccttcgtacgctgatcagataattaattttacctttcctcacgttggtaatgttgggactaataaagaggatcacgagtcagataaaatttggactaaaggagtaattataaacacagaaataactaatccttcaaattacagatctttaaaacatttaaatcaatggttaaaaaagaataagatagttgggataactggaattgacaccagaaatttaacaaattttataagagatagaggtgctcctaaagggacaatatctttttacaacaaaaataaaattaatattaaaaaactaattagaataactaataaatggagtggtcttaaaaatttagatttggcaaaaatagtcaccactaagaagaattatttatggcaagattataaaacttggaaaaaagaaagtggatatttaaaaaataagaaaaaattattacatgtagttgcaatagactatggtataaaaaaaaatattttaagatatttttcagattttaattgtaaagttacaattgtaccatgcaagacaactgcaaaagatattttaaaactgaaccctaatggtatatttttatcaaatgggcctggagatcctgctgcaactggaaaatatgctatcacgataattcaaaacttaattaaaaggaaattgccattat

SEQ ID NO: 318925 - DNA, 415 bp, Unknown
  Bacterial polypeptide expressing nucleotide sequence isolated from the Sargasso Sea
attgatcaaaaaacaaaaaaacaaaattgcaattaatcatcaatttcctacaggtattttagttctagataacaagatagttttcaaaggtattggccttggatatcaaggaacttcaactggagaggtttgtttcaatacctctttaacaggatatcaggaaattatatcagacccatcttatgctggacaaattataaactttacatttcctcatattggaaacgttggaaccaataatgaggatttagagtctaataaaatttggacgaaaggtgtaatatttaattccgaaattacttatccatcaaattatagagcattacagacattagataaatggcttaaaaaaaatcaaattgttggattaactggattagatactagaggcttaacaaactttattagagataag

SEQ ID NO: 318926 - DNA, 208 bp, Unknown
  Bacterial polypeptide expressing nucleotide sequence isolated from the Sargasso Sea
catgggttttgctattgatcccaattctctcccaaaggacatagttagaattacccactataaccttaacgataatactgtggctggcctagaggtttacaataagcctatatttagtgtgcaatatcatccagaagcaggacctggcccacatgattcagattatttattcaaaaaatttgtttctctaatgttagaaagatgttga

SEQ ID NO: 318927 - DNA, 136 bp, Unknown
  Bacterial polypeptide expressing nucleotide sequence isolated from the Sargasso Sea
attaagttaaaaaataaacctgtattttcagttcaatatcaccccgagtctaaccctggaccacaagatagtgtctatttatttaaagaatttattaacgatatgaaaaaaaatgccaaaaagaaaagatcttaaa

SEQ ID NO: 318928 - DNA, 341 bp, Unknown
  Bacterial polypeptide expressing nucleotide sequence isolated from the Sargasso Sea
attgatcaaaaaaccaaaaaaaagaaactcaaaaaaatctcaaattcatacaggcattttagttcttgaaaacaagaaagtctttaaaggtattggtattggttatcaaggatcagccactggtgaagtttgctttaacacttccataacaggataccaagaaatcatatcagacccatcttatgcgggacaaattataaactttacatttcctcatattggaaatgtaggaactaacaaagaagattatgaatcagacaaaatatggactaaaggagtagtttttaattctgaaataacatctccatcaaattatagatcatttttacacttagataatt

SEQ ID NO: 318929 - DNA, 256 bp, Unknown
  Bacterial polypeptide expressing nucleotide sequence isolated from the Sargasso Sea
ttgtgacattctagctttgggagatacattccctcaacaggcttttatttataaaaatgcagttggaatacaatttcatcctgaggttaatcttaaaatgcacttgaggtggctatattttgcaggatatatgcttagagaaaaaggagcgcaaaaacgtcattaccaaatgcagcaacgacttagtcatggaaaaaaaatcaatatgtggttagactcttttttagataattacttttttataaataaatcatga

SEQ ID NO: 318930 - DNA, 572 bp, Unknown
  Bacterial polypeptide expressing nucleotide sequence isolated from the Sargasso Sea
attgaacaaaaaacaaaaatataaaattgcaattaaacaacaatttccaacaggtattttagctctagataataagttagttttcaagggtattggtcttggatacaatggtactgcaactggagaagtttgttttaacacttctttgactggatatcaggaaattatatctgacccttcgtatgctggacaaattatcaactttacattccctcatataggaaatgttggaactaacaacgaggatttggagtcagataaagtttgggcaaaaggtgctatatttaattctgaaattacttctccatcgaattacagagctttaagaacattggatgaatggcttaaaaaaaataaaatagttggcataacaggtctagacacaagaagtttaacaaattttataagggataagggtgctccaaaaggaacaatctcaaacaataaaacaggcaaatttaatatgaaaaaattaattaattactcaattaaatggcctggtctaaatggtctagatcttgcaaaagaagtatcaacaaaaaaaacttattcgtggaaaggttttaaaactt

SEQ ID NO: 318931 - DNA, 620 bp, Unknown
  Bacterial polypeptide expressing nucleotide sequence isolated from the Sargasso Sea
attgaacaaaaaacaaaaaaataaaattgcaattaaaaatcaatttccaacaggtattttagttctagataacaagttaatttttaagggtattggtcttggataccaaggtacctcaacaggagaggtctgttttaatacttctttaactggataccaggaaattatatctgacccgtcatatgctgggcaaattattaacttcacattccctcacataggaaacgttggaaccaacaatgaagatttggagtcagacaaagtttggacaaagggtgcaatatttaattctgagattacttctccctcgaattacagagccttgagaacattagatgaatggcttaaaaaaaataaaatagttggtttaaccggattagacactagaagtttaacaaattttataagagataaaggcgctccaaaaggaacaatttcaaataacaaaaaaggcaaatttaatataaaaaaattaattaattactcaatcaaatggcctggtctaaatggtctggatcttgcaaatgaagtatcaacaaaaaaaacttattcatggaaaggttttaaaacctggagaaaagagactggatataaaaaaaataccaaaaaaatatttaaga

SEQ ID NO: 318932 - DNA, 249 bp, Unknown
  Bacterial polypeptide expressing nucleotide sequence isolated from the Sargasso Sea
atgataaagttgaaatcaccagtcaaaatcatggttttgtagtagttgaagaaactttacctaaaaaaattgaagttactcataagtctctttttgataacaccattgaaggaataagacttaaaaacaaaccaatattttcagtacaatatcatccagagtctaaccctggaccacaggatagtgtctacctatttaaagaatttattaacaatatgaaaaaagatgccaaaaagaaaagatattaaa

SEQ ID NO: 318933 - DNA, 813 bp, Unknown
  Bacterial polypeptide expressing nucleotide sequence isolated from the Sargasso Sea
aatgcagcgggatattaataataatcaacacctacgccctccttcagccgctttaatttttgataatggtgaagtattatggggttttggtattggaaaaattaaatctgttattgcagaattatgctttaatacttcccaaacaggttatcaagaaaccttaaccgatccttcatatgcaaaacaaataataaattttacttttccacatattggaattgtaggcactaataatgaagatttggaatctaataaaatatttgccgaaggatgtattattaatcaatctattgataattactcaaattggagagctcaaaaaaacttaaatgattttttaatttatcataatactccaggcataacaggaattgatactagatatttaacaaaaaaattatcaaaagagggtgcaaaaaaagtagctttaataaattttggcgaaaataaaaaaaatttagaaaatataaaagaaagtcttaagatatggagcggtttggaaaacttagatttagcaactattgtgtctacaaaaaatcaatttacttggaatgaaggcctttggaagataacgaataagcaagtatcttataaaaaatttccaatagtatgtttagattttggtataaaacataatattttaagaaatttaaataatttaaactttcaaactacagttttaccagcaaccagctcaatagaacaaattctaaaatttaaacctactggaattttcttatctaatggacctggagatcctgatgctacaataaaaattattttacctactataaaggagttaattaaattaaa

SEQ ID NO: 318934 - DNA, 733 bp, Unknown
  Bacterial polypeptide expressing nucleotide sequence isolated from the Sargasso Sea
aacggtaaattttttaaaggcattggattaggctacaaaggtaccgtgactggtgaagtatgttttaatacctcaattactggttaccaagaaataatttctgacccctcttatgcagatcaaattataaactttacttttcctcacgtaggtaatgttggaactaatcaagaggatcatgagtcagataaaatatggactaaaggggtaataataaacactgaaattactaatccttctaattacagatctttaaaacatttagatcaatggttacaaaaaaataagatagttggaataactggaattgatactagaaatttaacaaattttataagagataaaggtgctcctaaagggacgatatccttctataacaaaaaaaaaataaatataagaaaactcattaaaataactaataaatggagcggtctcaaaaacttggatttagcagaacaagtttctactaaaaagagttatttatggcaagactataaaacttggaaaaaagagaatggatatttaaaaaataaaaaaaaattattacacgtggtggcaatagactatggaattaagaaaaatattttaagatatttttcagattttaattgtaaggttacaatcgtgccatgtaagacaaccgcaaaagatattcttaaacttaatccaaatgggatttttttatcaaacggaccgggggatcctgccgcaactggaaaatatgctataccga

SEQ ID NO: 318935 - DNA, 459 bp, Unknown
  Bacterial polypeptide expressing nucleotide sequence isolated from the Sargasso Sea
attgaagaaaaaagcaaaaaaaaataactcaaaaaaaatctctaggattcacacaggcgttttagttcttgaaaatagaaaagtctttaaaggtattggtataggttacctaggtacagcaactggagaagtgtgttttaatacttcgttaactggttaccaagaaattatttctgatccttcttatgcggagcagataataaattttacgtttccccacataggaaacgtaggtaccaacaaggaagatcacgagtctgataaaatttggacaaaaggagttatttttaattctgatattacaaacccgtcaaattatagatctttagcaaatctagattggtggcttaaaaaaaataaagttgttggaataacagggttagatactagaagtttaactaatttcattagagataaaggcgctccaaagggaacaatttctttatcaaaaaatggaaa

SEQ ID NO: 318936 - DNA, 692 bp, Unknown
  Bacterial polypeptide expressing nucleotide sequence isolated from the Sargasso Sea
attgatcaaaaaacaaaaaaaaactaactcaaaaaaaatttcaaacattaagacgggcattttagttcttgaaaataaaaagatttttaaaggtattggaatgggctatgaaggaatagcaacaggcgaagtctgttttaatacttcattaactggataccaagaaataatttctgacccatcttatgcgggacaaattattaattttacttttccacatattggaaatgttggaacaaataaagaagatcatgaatccgataaaatttggacaagaggagtcattttaaattctgaaataactgatccttctaactacagatcattattgcatttagactcttggctaaaaaaaaataagatagtgggaattactggtttagatactagaagtttaacgaactttattagagataaaggagctcccaaaggtactatcagttattcaaaaaatggaaaatttaatattaataaactttctaatactgcaattaaatggagcggactaaagaatttagatcttgcagaaatagtctcaacaaacaaaaattatatttggaaaggttttaaaacctggaataaaaaaaatggatataaaaaaaataataaaaatatctaccatgttgttgcaattgactatggaattaaaaaaaatattttaagatatttttctgattttaattgtaaggtaa

SEQ ID NO: 318937 - DNA, 232 bp, Unknown
  Bacterial polypeptide expressing nucleotide sequence isolated from the Sargasso Sea
ttggttcttgaaaacaaaaaagtttttaagggaattgggattggctatcaaggagaagcaactggagaagtttgctttaatacctctttaaccggttaccaagaaataatttcagatccatcttacgcaggtcagattataaattttacttttcctcatattggaaatgttggaactaataaagaagatgtcgagtctgataaaatttggacaagaggaagtaatctttaac

SEQ ID NO: 318938 - DNA, 601 bp, Unknown
  Bacterial polypeptide expressing nucleotide sequence isolated from the Sargasso Sea
ttggtagtaaaaacaaacacaaagcataattcaaaagataatctcaaaaagattaatcctacaggcgttttagttttagaagatggcactttttttaaaggcaaaggtttaggctatgaaagcacaacaactggggaagtttgttttaatacttctattacaggctatcaggaaataatatcagatccatcctacgcgggacaaataatcaattttacattccctcatattggaaatgttggcgcaaataacgatgatcacgaatctgataaaatttggactagaggtgtaatttttaattctgaaatttcaaatccatcaaactatagagctttaaaacatttagataattggctaaaaaaaaacaagatagtgggtattgccgggcttgacacaagaagtttaacaaactttataagagacaagggtgcacccaagggaaccatttctttttctaaaaaaggaaagtttaatattaataaattaaaaaatttatcaattaaatggaatggtttaaaaaatttagatttagcagaacaagttacaaccaaaaaaaattataaatgggctggatttaaaacgtggaaaaaggaaagtcgat

SEQ ID NO: 318939 - DNA, 151 bp, Unknown
  Bacterial polypeptide expressing nucleotide sequence isolated from the Sargasso Sea
aggtccgcataggaacctcaatgatggcacaattgaaggcatccgccataagacagaggccgctgcaagcgtccagtaccacccggaggcagcagcagggcctcacgattcatcgcctcttttcctccgctttcgtgaaatgctgaactag

SEQ ID NO: 318940 - DNA, 661 bp, Unknown
  Bacterial polypeptide expressing nucleotide sequence isolated from the Sargasso Sea
ttgattaaaaaacaaaaaaattacttcaaaaaaaacactataaaaaattcaggtattcttgtccttgataataaaaccttttttaaagggattggtcttggctatgacggtactgcaactggagaaatttgttttaatacatcgttaacaggatatcaggaaataatatctgatccctcttatgcgggtcaaataattaactttaccttcccacatataggcaatgtaggaacgaataatgaggatttagagtcagacaaaatttggacaagaggggtcatatttaattctgagataacaaacccttcaaattatcgatcgctaagccatttagacctttggttaaaaaaaaataaagtagttggtctaactggaattgatactagaagtcttactaattttattagagaaaaaggagcaccaaagggaactatatctgtaaataagaatggtaattttaatataaaaaagttaacaaatctctctattaagtggccaggtttaaatggcttagatcttgctaaagaagttacaacaagaaaaacttacaaatggaaaggcttacagacgtggaaaaaaggattaggttataaaaaatcaactaaaaataatttaataatagtagcaatagattttggtataaaaaaaaatatttcttaga

SEQ ID NO: 318941 - DNA, 248 bp, Unknown
  Bacterial polypeptide expressing nucleotide sequence isolated from the Sargasso Sea
tgataaagttgaaatcacaagtcaaaatcatggttttgtagtagtcgaagaaactttaccaaaaaaaattgtagtaactcataaatctctttttgatgatactattgaaggaatacgactgaaaaacagaccaatattttcagtacagtatcatccagaatcaaatcctggaccacaagacagtgtttatttatttcaagaatttattaacaatatgaaaaaaaatgccaaaaagaaaagatcttaaa

SEQ ID NO: 318942 - DNA, 439 bp, Unknown
  Bacterial polypeptide expressing nucleotide sequence isolated from the Sargasso Sea
tttgagacaggccctaaaaagaaaaaaagataaatcatataatttttctacaggtattttagtttttgaagatggcaccagtttttctggcaaaggcataggttatcaaggtgcggcggttggggaagtttgtttcaatacatcaatcacaggatatcaagaaataattaccgatccttcctattcagatcaaataataaacttcacatttccacacatcggaaatgttggaacaaatttagaggataacgaagcagacaaagcctgggtgaaaggcattattcttaattgtgacgtaactgagccatctaattatagatcaattaaaaagctgaatatttggcttaaaaaaagaaaaattgtaggtattgttggtttggataccagagtaattactaattacataagagataaaggggcccctaaaggcagtatacag

SEQ ID NO: 318943 - DNA, 754 bp, Unknown
  Bacterial polypeptide expressing nucleotide sequence isolated from the Sargasso Sea
tggttaattttacaaaaagatgaatatccaaaattaccgttaaaagaattagaaaaattttttgagcatggatatgatcaagaattaggttgggttagaaaaccaaatactgaacataatgaaattggaaaaaattcaagagtaacaaaatggacaactaattcgaatgctagtcgagcaaatccagattttgatgatatgcattcagagatttcatgttatggagattcatttacattttgtagacaagttaatgataatgaaacatgggaacattatttatcaaaatcattgaatacaaatattcaaaattttggggtaggtaattacggaattgatcaatctttattatatttaaaaaaaaattttcaaaaaaataaaactaatataataattttagcagtagttccagataccattagtagaatagtaagtgtttggaaacattactatgaatatggaaatacatttgggtttaaaccaagattttttttacagaaaaataatctaattttaaataaaaatccaattaattcacaagaaaaattttctaattatgaaaaatatttagaagagataagaaatagtgattttttctataagaataaatttagaaaagagaaaatttcatttccatattcaattacagtttttagaaatgcaaaaagaaattttagaataatttattgggttttaaaaatacaaaatttaaagaaaaaaggtatcgatacaaaagatattgattggaatccta

SEQ ID NO: 318944 - DNA, 676 bp, Unknown
  Bacterial polypeptide expressing nucleotide sequence isolated from the Sargasso Sea
atgattgtgcaccagcctcgatccagtactggagatgtaggtatgaaattacgcgaaagaggatatgagcttgatgtgaggaggcctgtcataggtgaaaagttacctcaatcaatggacgaacatgatgttgccgttatttacggtggacccccaagtgcgaatgatgatttggattacatcaaatatgaaattgattggatttcaacagctttattatctaataaaccttttctaggaatttgtctgggtgctcaaatgcttgcaaaaaatttgggaggcactgttcaacgtgctaaagatcatcaattcgaaattggtttttatgacataaagcctacgggggatggtcataaaatttttcaaaaccaaaaaactttttttcaatggcataaagaaggatttactgtgcccaaatcttgcgatattttagcgtttggtgaaacattccctcaacaagcatttaattataaaaatgcagttggtatacaatttcaccctgaggtaaatcttaaaatgcacctgaggtggctgtattttgcaggatatatgcttagagagaagggtgcgcaaaaacgtaattatcaaatgcagcaacgacttagtcatggaaaaaaaataaatatgtggttagactcttttatagataattattttcttagagataaatcatgaa

SEQ ID NO: 318945 - DNA, 598 bp, Unknown
  Bacterial polypeptide expressing nucleotide sequence isolated from the Sargasso Sea
ttgaagaaaaaagcaaaaaaaactaactcaaaaacaaaatcacaaatcaatacagccgttttagttcttgaaaacaaaaagatatttaaaggaattggaattggatacgagggtcaagccactggtgaggtttgctttaatacatctttaacagggtatcaagaaattatctccgatccatcatatgcaggtcaaattatcaactttacctttccgcatattggaaatgttggcaccaacaaagaggatcatgagtctgacaaaatatgggctagaggagttataattaactctgaaataacttcgccctcaaattacagatcctttctacatttagatgcttggcttaaaaaaaataaaattgtcggaattactggtttagacacaagaagccttacaaattttataagagataaaggggcacctaagggaacaatatcgtattcaaaaaatggaaaatttaatattagtaaactaactaataacacaattaaatggagtggattaaaaaatttagatcttgcacaagtagtttcaactaagaaaaattatactttggagaggtcttcagacctggaaaaaagagacaggatataaa

SEQ ID NO: 318946 - DNA, 736 bp, Unknown
  Bacterial polypeptide expressing nucleotide sequence isolated from the Sargasso Sea
ttgaaagaaaaacgaaaaaacaaaattgcaattaaatcaaaattttcatcagctattctagttctagataataaaacaacatttaaaggtataggtcttggttatcacggcgaagcaactggggaagtttgtttcaatacctctctcactggttatcaagaaattatttctgacccatcctatgcaggacaaataatcaactttacttttccacatataggtaatgtgggaacaaataatgaagatatagagtcagacaaaatttggacaagaggagtaattttcaactcagaaataactgacccatcaaactacagatcacttaaacatttagatcaatggcttaaaaaaaataaaattgtaggtattacaggcctagatactagaagtttaaccaattatataagagataaaggcgctccaaaaggaactatttcaaacagtaaatcagggaaatttaatataaaaaaacttattaaaaaaactattatttggcctggtttaaatggaatggacttagccaaagaggtatcaacaaaaaaaaattacaaatggaaagatttcaaaacctggagcaaagaagagggttataaaaaaaataaaaaaaaattatatagagttatagcaatagattacggaattaagaaaaatattttgaggtatttttcaaactttcattgtgaagtaaaggttgttcattgtaaggagtctgcagagaatttaattaaattaaaac

SEQ ID NO: 318947 - DNA, 422 bp, Unknown
  Bacterial polypeptide expressing nucleotide sequence isolated from the Sargasso Sea
attgaacaaaaagcaaaaagtaaactcaaaaaaatcttcatctttttcatcaggcgttttagttcttgaaaatagaacaatatttaagggtattggcattggttttcaaggaacggctactggagaagtctgcttcaatacttctttaacaggctatcaagaaatcatatccgatccatcttatgctggacaaattataaattttacctttccgcatattggaaatgtcggtaccaatacagaagaccacgagtcagacaagatttggacaaaaggggttatttttaatactgaaataactaatccatcaaattatagatccttaaaaaaattagatgtttggctgaaaaaaaataaaattataggcataacaggattggatactagaagcttaactaattttataagagacaaaggagcac

SEQ ID NO: 318948 - DNA, 740 bp, Unknown
  Bacterial polypeptide expressing nucleotide sequence isolated from the Sargasso Sea
attgatcaaaaaagcaaaaaaatctaactcaaaaaaaatttctcaaattaatacaggcgttttagttcttgaaaacaaaaaggttttcaaaggtattgggattggctaccaaggagaggctactggggaagtttgttttaacacctcattaacaggataccaagaaatcatatctgatccatcttatgctgggcaaattataaattttacctttcctcatattggaaatgtcggaactaacaaagaagattttgaatctgataaaatatggacaaaaggggtaatttttaattcagaaataacctcaccatcaaactatagatcttttcaacatttggatgcttggcttaagaaaaatagaattgttggaattacgggcttagatactagaagtttaactaattatataagagataaaggtgctcctaagggaactattgctttttcaaaaaatggaaaatttaatatcagtaaactaactaatttaacgataaaatggagtggattaaaaaaccttgatcttgcagaaaaagtaaccacaacaaaaaattatatatggaaaggacttaaaacatggaaaaaagagacaggttataaaaaaaatagtaaaaattcttttcatgtagttgcaatagattatggaataaaaaaaaatattttaagatatttttctgatttcaaatgcaaagtaactgtagttccttgcaaaacatcagctgaaaaaattttagctcttaaac

SEQ ID NO: 318949 - DNA, 679 bp, Unknown
  Bacterial polypeptide expressing nucleotide sequence isolated from the Sargasso Sea
ttgacaaaaaaagtaaaaaaaacaaactcaaaaaaatcacaatttcatacaggtattttagttcttgaaaatagcaagatttttaaagggattggaataggctatcagggagaagctactggtgaggtctgctttaatacttctttgactggttatcaagagataatttctgatccatcctatgcaggccaaataattaatttcactttcccacatattggaaacgttggaaccaataaagaagatgttgaatctgataaaatttgggcaagaggtgttatatttaattctgaaataacgtctccctcaaattatagagcatttttgcatttagatacctggctcaaaaaaaataaaattgttggaattactggactagatactagaagtctaacaaattttattagagataagggagcacctaaaggaacaatttcttactcaaaaaataagaaatttaatataaataaactaacaaactcgactattaaatggagtggattaaaaaatcttgaccttgcagaaacggtaacgacttcaaaaaactatatttggaaaggccttaaaacttggaaaaaagaaacaggatacgaaaagaataaaaaaaattcttttcatatagttgcaattgattatggaattaaaaaaaatattttaagatatttttcagatttcaaat

SEQ ID NO: 318950 - DNA, 213 bp, Unknown
  Bacterial polypeptide expressing nucleotide sequence isolated from the Sargasso Sea
tgaaaataattaaagaaagtttgcctaaaagtgttcaagttactcatcaatctctttttgataattgtattgaaggtatcaaactaaaaaataaacctgttttttctgttcaatatcatcctgagtcaaatccagggccgcaagatagtgtttatttgtttgaagaatttgtaaggagtatgaaaaaaaatgccaaaaagaaaagatcttaaa

SEQ ID NO: 318951 - DNA, 653 bp, Unknown
  Bacterial polypeptide expressing nucleotide sequence isolated from the Sargasso Sea
cagtactggagatgtggggatgaaattacgtgaaagagggtatgaacttgacgttcgaagaccagtcattggtgaaaagttacctaaatcaatgatcgatcatgatgttgcggtaatttatggaggacctcctagtgctaatgacaatttagattacattaagtatgaaattgagtggatctcaaaagcattatcttctaataagccgtttcttggtatttgtcttggcgcacaaatgcttgcaaaaaatttgggaggcaccgttcaacgtgcaaaagatcatcattttgaaattggtttttatgacataaagccaactggagatggtcacaaaatatttcaaaatcaaaaaactttttttcaatggcataaagagggattcacagcccctaaatcttgcgatattttagcgttaggtgacactttccctcaacaagcatttaactataaaaatgcagttggtatacaatttcaccctgaggttaatcttaaaatgcacttgaggtggctatattttgcaggatatatgcttagagaaaagggtgcacaaaaacgtaattatcaaatgcagcaacgacttagtcatggaaaaaaaataaatatgtggttagactcttttctagataattattttcttagagataaatcatgaa

SEQ ID NO: 318952 - DNA, 367 bp, Unknown
  Bacterial polypeptide expressing nucleotide sequence isolated from the Sargasso Sea
attcgaaattggtttttatgatataaagccgacaggagatggtcataaaatttttcaaaaccaaaaaactttttttcaatggcataaagaaggattcactgttccaaaatcatgtgatattttagcgttgggtgaaacattcccgcaacaagcatttaattataaaaatgcggttggcatacaatttcaccctgaggtaaatcttaaaatgcacttgaggtggctatattttgcaggatatatgcttagagagaagggtgcgcaaaaacgtaattatcaaatgcagcaacgacttagtcatggaaaaaaaattaatatgtggttagactcttttattgataattattttcttagagataaatcatga

SEQ ID NO: 318953 - DNA, 652 bp, Unknown
  Bacterial polypeptide expressing nucleotide sequence isolated from the Sargasso Sea
attgactttaaaacagaaaaacaaatcttcacatctttcaaattttaatacagctgttttagttctagaaaataaatcagtctttaaaggtatcggactaggttataaaggagaggcaactggcgaagtatgctttaatacctcattaactggttatcaagaaattatatctgacccatcttatgctggacagataataaattttacatttcctcatattggcaatgtgggaactaatgaagaggatttagagtctgataaaatatggacgagaggtgttatttttaattcagagataacaagtccatctaattatagatctcttcagaatttagataaatggcttagaaaaaataaaattgtaggcataactggtctcgatacaagaagtttaacaaattttattagagacaaaggagctccaaaaggaacaatttcaaacaataaaaatggtaaatttaatatcaataaacttataaataaatcaattaaatggcctggtttaagagggatggatttagcacaagaggtcacaactaacaaaacatatatttggaaaggatataaaacttggaaaaaaattaaaggatatgagaaaaataagaagaaaaaatttagggttgttgcaatagactatgaatcaaaaaaaata

SEQ ID NO: 318954 - DNA, 412 bp, Unknown
  Bacterial polypeptide expressing nucleotide sequence isolated from the Sargasso Sea
ttgaaaaaaaaacagaaaactaattccaacaaaaaatcaaaattatcatctggtattttagttcttgaaaacgggcaagtatttaggggtataggccttggtcatgagggagaagctacaggtgaagtctgtttcaatacttcaataaccggataccaagaaataatttctgatccctcttattcaggacaaataattaattttacatttcctcacattggaaacgtagggactaatcaagaggatcatgaatcggataaaatatggacaaaaggggtaatatttaatgctgaaataacaagcccttcaaattacagatccttaaaaaatctagatgtatggctaaaaaaaaatcggattgttggtttgactggtattgacaccagaaagtttaacaaaattttatcagaga

SEQ ID NO: 318955 - DNA, 175 bp, Unknown
  Bacterial polypeptide expressing nucleotide sequence isolated from the Sargasso Sea
gatgacacataaatctttattcgataattctgtagaacgaataaagttaaaaaataaacctgttttttctgttcaatatcacccagagtcaaatcctggccctcaagatagccattatttatttaatcaatttattaatttagtaaaaaaaaatgccaaaaagaaaagatattaa

SEQ ID NO: 318956 - DNA, 178 bp, Unknown
  Bacterial polypeptide expressing nucleotide sequence isolated from the Sargasso Sea
atcaaatataaaaacgacgcatatttctttatttgataaatctcttcaaggaattgagtttaaagattctcctgcatttagttttcaaggtcatcctgaggcaagtcctggacctcaagaaattcaaagcttattcaaaaaattcagtttaatggtagaaaattatgccaagacgtaa

SEQ ID NO: 318957 - DNA, 151 bp, Unknown
  Bacterial polypeptide expressing nucleotide sequence isolated from the Sargasso Sea
gatagtatcgaaggcataagattaaaaaataaaccagtattttctgttcaatatcatccagaatcaaatcctgggccacaagatagtgtttatttatttcaagaatttattcataacataaaaagaaatgccaaaaagaaaagacattaaa

SEQ ID NO: 318958 - DNA, 673 bp, Unknown
  Bacterial polypeptide expressing nucleotide sequence isolated from the Sargasso Sea
ttgaacaaaaaacaaaaaaacaaaattgcaattaaacatcaaattccaacaggtattttagtattagataataagcttgtttttaaaggtattggtcttggatatcaaggtaccgcaactggagaggtttgttttaatacctctttaacaggatatcaggaaattatatctgacccatcatacgctggccaaattatcaactttacattccctcatataggtaatgttggaaccaatgatgaagatttagagtctgataaagtttgggctaagggtgctatatttaactctgagattacatctccatcaaattatagagctctaaagactttagatgaatggcttaaaaaaaacaaaatagttggattaactgggctagatacaagaagtttaactaactttataagagataaaggagccccaaaaggaacaatctccaataataaaaaaggtaaatttaatataaaaaagctaattaataactcaatcaaatggcctggactaaacggtttagatcttgcaaaagaagtatcaacaaaaaaaacttatacctggaaaggttttaaaacatggaaaaaaaatattgggtataaaaaaaataataaaaatatatttaaaattattgcaattgattatggaataaaaaacaaacattctcagatatttttctgat

SEQ ID NO: 318959 - DNA, 481 bp, Unknown
  Bacterial polypeptide expressing nucleotide sequence isolated from the Sargasso Sea
ttgaacaaaaaacaaaaaaataaaattgcaattaaacatcaatttccaacaggtattttagttctagataataagatagttttcaagggcattggtcttggatatcaaggtacagcaaccggagaggtttgttttaacacttctttaactggatatcaggaaattatatctgacccttcatatgctggacaaattattaactttacatttcctcatattggaaatgttggaactaacaatgaggatttggaatcagacaaagtttgggcaaagggtgctatatttaattcagagattacttctccctcaaattacagatctttaagaacgttagatgaatggcttaaaaaaaataaaatagttggtttaactggactagacacaagaagtttaacaaattttataagggataaaggtgccccaaaaggaacaatctcaaataataaaagaggcaaatttaatataaaaaaaattaattaat

SEQ ID NO: 318960 - DNA, 734 bp, Unknown
  Bacterial polypeptide expressing nucleotide sequence isolated from the Sargasso Sea
attgaaagaaaaacacaaaaataaaattgcaattaaatcaaaatttccgtcagctattttaattttagaaaataaaaggatcttcagaggtattgggctaggttatcagggtgaagcaaccggggaagtttgttttaatacatctttaacaggttatcaggaaattatatctgatccatcttatgcaggacaaataattaacttcacttttcctcacattggtaatgttggtacaaataatgaggatatagagtcagacaaaatttggactagaggcgtcatctttaattcagaaataacaaatccatcaaattatagatctcttaaacatttaaacgaatggcttaaaaaaaataaaatagtaggaataactggactagatactagaagtttaactaatttcataagagacaaaggtgcacctaaaggcactatttctaataataaatcgggaaaatttaacataaaaaaacttataaaaaaaactattgcttggcctggactaaatggaatggatctagcaaatgaagtatcaactagaaaaaattatacttggaaaggttttaagacatggaataaagatgaaggatataaaaaaaataataaaaaaaaatttagagttattgcaatagattatgggattaagaaaaatattttaagatacttttctaactttgattgtgacgtaaaagttgtatcctgtaaagaaagtgttgaaaatttattaaaactag

SEQ ID NO: 318961 - DNA, 244 bp, Unknown
  Bacterial polypeptide expressing nucleotide sequence isolated from the Sargasso Sea
attgaccaaaaaagtaaaaaaaattaactcaaaaaattcgcaaatcaatacaggtattttagttcttgaaaacaagagagtttttaggggtatcggtattggttataatggagaagcgacgggtgaggtttgctttaacacttcattaacaggataccaagaaataatatcagacccatcttatgcaggacaaatttataatttcacattccctcatattggaaacgttggaactaacaaagaa

SEQ ID NO: 318962 - DNA, 260 bp, Unknown
  Bacterial polypeptide expressing nucleotide sequence isolated from the Sargasso Sea
aaatttagtccatgataaagttgaaatcaccagtcaaaatcatggttttgtagtggttgaagagagtttaccaaaaaaaattgaagtaactcataaatctctttttgataatactattgaaggaataagactcaaaaacaaaccaatattttcagtgcaatatcatccagagtcaaaccctggaccacaggatagtgtctacttgtttcaagaatttattaacaacataaaaaaaaatgccaaaaagaaaagatattaaa

SEQ ID NO: 318963 - DNA, 481 bp, Unknown
  Bacterial polypeptide expressing nucleotide sequence isolated from the Sargasso Sea
ttgatcaaaaaagcaaaaaaaactaactcaaaaaattcagaaatcaatacaggcgttttagttcttgaaaataagagggtttttaaaggaattgggattggttatcagggagaagcgactggagaagtttgttttaatacgtcattaactggttatcaagaaattatatcggatccatcttacgcaggacaaataataaactttacatttcctcatattgggaatgttggaaccaataaacaagattatgaaagtgataaaatttggacaaaaggagtaatttttaattctgaaataacatctccatcaaactatagatcttttcaacatttggatgcttggcttaagaaaaataaaatagttggtattactggattagataccagaagtttaacaaatttgattagagataaaggtgctcctaagggaacaattgccaattcaaaaactggaaaatttaatattagcaaacttactaact

SEQ ID NO: 318964 - DNA, 625 bp, Unknown
  Bacterial polypeptide expressing nucleotide sequence isolated from the Sargasso Sea
atggggttgacgactgttaacctttttcatataagacgcaaaaccttacttaaaaggtttcctttaactcatgagttgtatttgagacaggccctaaaaagaaaaaaagataaatcatataatttttcgacaggtattttagtttttgaagatggaaccaaattttttggtaatggcattgggtatgaaggaaatgctattggagaagtttgtttcaatacatcaattactggttatcaagaaataataactgatccttcttactcagatcaaataatcaattttactttcccccacattggtaacgtgggtacaaatattgaagacaacgaagcagataaaacttgggtgaaaggtgttattctcaattgtgatattacagaaccatccaattatagatctgttaaaaagttagatatttggcttaaaaaaagaaaaattgtaggtatttttggcttagatactagaactataacaaattatataagagatgtgggggccccgaaaggaacaatacaatttttaaaaaaaggaaaccataactttaaagatcttttaaataaatcaagatcctggaatggtctaataggattagacttggctaagaaagtgacttgtaaaaagc

SEQ ID NO: 318965 - DNA, 310 bp, Unknown
  Bacterial polypeptide expressing nucleotide sequence isolated from the Sargasso Sea
ggattagcattaggaggttcaacttataagttaccttttggacatcgtggtttaaaccatccttgtggtgaaaataataaagttgagataactagtcagaatcatggttttgctattgatcccaattctctctcaaaggacatagttagaattacccactataaccttaatgataatactgtggctggcctagaggtttataataaacctatttttagtgtgcaatatcatccagaagcaggacctggcccgcatgattcagattatttatttaaaaaatttgtttctctaatgttagaaagatgttgac

SEQ ID NO: 318966 - DNA, 292 bp, Unknown
  Bacterial polypeptide expressing nucleotide sequence isolated from the Sargasso Sea
ttgggccatagaggggctaatcatcctgttaaaaatttagtacatgataaagttgaaatcaccagtcaaaatcatggttttgtagtggttgaagaaactttacctaaaaaaattgaagttactcataagtctctatttgataataccattgagggaataagacttaaaaacaaaccaatattttcagtacaatatcatccagagtctaaccctggaccacaagatagcgtctacctctttcaagaatttattaacaatatgaaaaaaaatgccaaaaagaaaagatattaaa

SEQ ID NO: 318967 - DNA, 667 bp, Unknown
  Bacterial polypeptide expressing nucleotide sequence isolated from the Sargasso Sea
tttgaagcagattgatcaaaatataaactctaataaaaatctcaaaaagatcgattgcaacgctattttaattcttcaaaacggtaaattttttaaaggtcatggcttaggttatcagggcgctgcgacaggtgaagtgtgtttcaacacatcaataactggctatcaagaaataatatctgatccctcttatgctgagcaaatcattaattttacctttcctcacattggaaacgtaggaactaacaaagaagatcatgaatctgacaaaatatggaccagaggagttataattaataccgaaataacagacccctcaaattacagatctttaaagcatttagatcaatggttaagaaaaaataaaatagtcggtataactggaattgacactagaagcttaacaagtttaattagagataaaggagctccaaaaggaaccgtctctttttctaaaaagaataaatttaatataaaaaaacttctaagaactacacaaaaatggagtggactaaaaaatttagacttagctcaaaaagttacaacaaaaaaaagttatgtttggcaaaattataaaacatggaaaaaagaagctggatttttaaaaaataaaaaaaaatcacttcatgtcgttgctatcgactatggtataaaaaaaatattttaa

SEQ ID NO: 318968 - DNA, 142 bp, Unknown
  Bacterial polypeptide expressing nucleotide sequence isolated from the Sargasso Sea
tgaaggaattaagttaaaaaacaaacctgtcttttctgttcagtatcatccagaagcaaatcctggtcctcaagatagccaatatttatttaaaaactttattcaaaatgtaaaaaaaaatgccaaaaagaaaagacattaa

SEQ ID NO: 318969 - DNA, 391 bp, Unknown
  Bacterial polypeptide expressing nucleotide sequence isolated from the Sargasso Sea
gttgaaaaaagatcgtacaactactcggcctaaacctatagaaggccaacttattttcgaagatggctcgtatttcaatggtattaaaattggctcttcaaacatggaaattggtgaggtgtgcttcaatacttcaatgaccggttatcaagagataataactgacccctcttatgcgggacaaataattaattttacctttcctcacattggtaatgtgggcacgaatcatgaagatgatgagtcaagaaagccatttgcaaaaggaataattattaattgtgatatttctgacccttcaaactatagatctattcttcatcttgatgcgtggcttaaaaaaaataacgtacctggtatatgcaatattgatacaagactaattacaaat

SEQ ID NO: 318970 - DNA, 175 bp, Unknown
  Bacterial polypeptide expressing nucleotide sequence isolated from the Sargasso Sea
tcctaaaaacgtaaagattactcataaatctttatttgatggtagcgttgaaggtattgagcataaacataaaaaaatttttgcagttcaataccacccagaggcaagtcctgggcctcatgacagccggtatctttttcaaaaatttaaagggatgattagcagtaatgcctaa

SEQ ID NO: 318971 - DNA, 828 bp, Unknown
  Bacterial polypeptide expressing nucleotide sequence isolated from the Sargasso Sea
tatggggtcaggtctgggagctttaaaatctgtggttgcggaattgtgcttcaatacttcacaaactggctatcaagaaactttaactgatccatcttattcaaaacaaatcattacatttacttttccccatattggaattgtaggaacaaatgatgaagatttagagtcaaataaaatttatgctgaaggatgtattataaatcaatctattgatgaattttcaaactggagagcacaaataagtttagattcttttcttaaaaaaaataatattccaggtattatagatattgatacacgttatttaactagaaagttatctaagcaaggtcctcaaaacgtggctttaattaattttggtgaaactaaagaaagttttgataaattatttcaaaaattagaaaattggaatggtcttgaaaatttagatttagcaactttagtatcaacaaagaaggaatatgattggaatcgtggtttatggaataaaaaaattaatacagaaaattttgaaaaatttcctattgtatgtttagattttggtattaaacagaatattcttagaaatttaaaaaatttaaattttgatccaacaatattgccagcaactagttctgctaaagaaattttgagtaaagaacccaaaggaatatttctttctaatggcccaggagatccagatgccacaataaaacttattctaccaacaattaaagaactattaaaatttcaaatacctatatttggaatttgcttaggtcatcaaattattagtttggctttaggggcaaaaacaaaaaaaatgtatcaaggtcacagaggtgc

SEQ ID NO: 318972 - DNA, 212 bp, Unknown
  Bacterial polypeptide expressing nucleotide sequence isolated from the Sargasso Sea
aaatcatggttttgctattgatcctaactctctctcaaaggacatagttagaataacccattacaaccttaacgataatactgtggctggcttagaagttaaaaataagcctatatttagtgtgcaatatcacccagaggcgggtcctggcccacatgattcagattatttatttcaaaaatttgtttctctaatgttagaaagatgttgac

SEQ ID NO: 318973 - DNA, 182 bp, Unknown
  Bacterial polypeptide expressing nucleotide sequence isolated from the Sargasso Sea
ccacggatttgcgaacaacactgaaagtttaccaaaaaatatttttgaaagccacgtatctctctttgatggatcgaactgtggaatagagcataaagaaaagaatatattttcggttcaatatcaccccgaggcaagtccaggcccacacgacagcctctatctattcagtaaattcgtta

SEQ ID NO: 318974 - DNA, 784 bp, Unknown
  Bacterial polypeptide expressing nucleotide sequence isolated from the Sargasso Sea
aattaaatctcaattccccccagctattttagttcttgaaaataagtcaattttcaaaggcattggtttaggctaccaaggcgaagcaacgggcgaggtttgtttcaacacttctttaactggatatcaagaaattatttcagatccttcttatgctggacaaattattaactttacttttccacatattggaaatgtaggaacaaataaagaagatttggagtctgaaaaaatttggacaagaggtgttatttttaattcagaaataacaagcccatcaaattacaggtcgcttcaaagtttagattattggttaaaaaaaaataaaattgtaggaatcactggattagacacaagaagtttaacaaactttataagagataaaggtgcgccgaaaggcactatctcaaataataaatctggaagttttaatattaataagcttattaacatgacaaataaatggccaggactcaatggtatggacctagctgaaatagtaactactcctaaaacttataaatggataggtttaaaaacttggaaaaaagaaaaaggatatcaaaaaaataaaaaaaaaaatcttaaaatagttgcaatagattatggaattaaaaaaaatattttaagatatttctcagattataattgcgaagtaaaagttgtttcatgtaaaaaatctgctgaagaaattttaaagttaaaaccacaaggaatttttttatctaatggacctggtgatccagctgctactggtaagtatgctattcaaactattaaaact

SEQ ID NO: 318975 - DNA, 856 bp, Unknown
  Bacterial polypeptide expressing nucleotide sequence isolated from the Sargasso Sea
ctgcttgctgatggttcgcgccatgagggtgacttgttcggagcagccaccatcgctgaaggtgaattggtcttcaccacaaacatgaccggataccaagaatcactgacagacccctccttcgcgggtcaggttctcacattcacttggcctctactcggcaattatggaattgcaccggggatttctgaatctgcgggagtttggccacgtggggtggtttgccgcgaattgatgatggaaccagaccaccgtcattgcattggtacggttcacgatcttctcctagcgcatggagtgccagggatatcgggtattgacacacgctctgtcactcgcagagttcgcgaatacggtgtaatcttgagcatatttggaccgattgagaaagaagccgaaatggctgccactctagagaaaatgaagtcgccagatctggatgatctcgctgacgaggttagtcgagatgatgcagtcttcctcaatgaaggtgcgacggacgatgatggaaatccattgccacgtgttgctgccctcgattgtggaatcaaatacaacatcctgcgggagttgtgctctcgcttcgaagtcttgtggtgtcctcctgacattgattgggatgaattgtgcgagacgtacaagattgatgcattgttctgtagcaatggccctggtgaccctgcccatcctggcaaagcaaccgatgcgcgtcacactttggccaaggcgaccaaatcaggcatgccagtcatgggcatctgcttgggccaccagttgatgggattggccagtggtttgcgcacctacaagttgcgctatggacacagaggtggcaatcaacctgtgcttgatttgc

SEQ ID NO: 318976 - DNA, 190 bp, Unknown
  Bacterial polypeptide expressing nucleotide sequence isolated from the Sargasso Sea
aacccaactgtattaaacttattttctagctacgaagaaataatagaaactgatccttcaggaatttttttatcaaatggccctggtgatccttatgccacaggtagtaaaatagttgatgtgattaaaaaattaattgatgataatattccgatatttggaatatgtttagggcatcaaattttaggat

SEQ ID NO: 318977 - DNA, 265 bp, Unknown
  Bacterial polypeptide expressing nucleotide sequence isolated from the Sargasso Sea
cctggagacggccgtgagtaactccggaaatctcgcgacagagcccgccgttctcgtcttggaagatggccgggccatgcatggtcggtcgtttggagccgtggggacgaccttcggggaggcggtgttcaccaccggcatgaccggttatcaggaaacgctgacggatccgagttaccaccgtcaggtggtcgtgatgaccgctccgcacgtgggcaacaccggcatgaatgacgaagatgcggaatcagaacgcatctgggtg

SEQ ID NO: 318978 - DNA, 460 bp, Unknown
  Bacterial polypeptide expressing nucleotide sequence isolated from the Sargasso Sea
ttgaaaaaagatcttgcaacagctcgacctaaacctattgaaagccaacttattcttgaggacggttctgtatttaacggcattaaaatcggttcatctaaaatggaaataggggaagtctgtttcaatacgtcaatgacaggttatcaagagataataactgatccttcttatgcagggcaaataattaattttacctttcctcatattggtaatgtgggcacaaactttgatgataatgagtcaaaaaaaccttttgcaaaaggtataattattaattgtgatatttctgatccttctaactataggtctattcttcaccttgatgcatggcttaaaaaaaataacgtacctggtatttgtaatattgatacaagattgattacaaataaaattcgatcagaaggtgcaccaaaaggtggtattgttgaaggtccaataaacagtaaaaaaacttctt

SEQ ID NO: 318979 - DNA, 471 bp, Unknown
  Bacterial polypeptide expressing nucleotide sequence isolated from the Sargasso Sea
tttgagtcaatacaaacctagaaaaaaagcttttgttttacttgaggatggaactattttccatggaaaatccattggaattgatggaactgcttttggtgaattgtgctttaatacaggcatgactggctatcaagaaattttcacggacccatcctacaatggtcaactaatggttatggcaaacgcccatattggtaattatgggacaaatttagatgaagtagaatcagattctgtcaaaattgcaggtcttatttgtaagaactttagttttaacttttccagacatggtgattcaacatcactctttgatttcttatcctctaataaaatagtatgtatttctgatgttgacacaagagcattggtaagttatataagagataatggagctatgaatgctgtgatatcaacagaatccattgattcaattgataaaataaaaaaacaactttcaaaagttctttc

SEQ ID NO: 318980 - DNA, 154 bp, Unknown
  Bacterial polypeptide expressing nucleotide sequence isolated from the Sargasso Sea
atgtcattcaaagccatattagcatttgaagacggtagtgtattccatggaaaggggtttgggaaagaaaaatatgatgttggtgagcttgtatttaatacatccatgacaggctaccaagaaattgttacagatccctcatacaaaaaacaaa

SEQ ID NO: 318981 - DNA, 244 bp, Unknown
  Bacterial polypeptide expressing nucleotide sequence isolated from the Sargasso Sea
atggtcagcaatggtcttctggtgctcagcaacgggatgtttttccgtggttggatccatggcccctttcaggcgacaggtgaactgatattcaatacctcaatgaccggttaccaggagattttgactgatccatcatactgcggtcagatcgtgacgatgacggctccccatatcgggaattatggaaccaaccccgatgatatggaatcttccaccatccatgcttctgctctggtggtga

SEQ ID NO: 318982 - DNA, 160 bp, Unknown
  Bacterial polypeptide expressing nucleotide sequence isolated from the Sargasso Sea
ttgaaaaaagatcgtgcaacagctcgacctaaacctattgagggtcagcttattcttgaagatggatcccattttaatggaattaaaattggttctcctaacatggaaattggtgaagtatgtttcaatacatcaatgacaggctatcaagagataataa

SEQ ID NO: 318983 - DNA, 400 bp, Unknown
  Bacterial polypeptide expressing nucleotide sequence isolated from the Sargasso Sea
gatgtcttttccagctattttggttcttgaggatgacactattattgagggtattggatttggtgtaaaagagctaacagtaggagaaattgtttttaacacatctatgtcaggttatcaggagattattacggatccatcttatgccaaacaaattatagcttttactcatccacatattgggaatacgggaattaatgatgaggataatgagtctgatagtattcatgcttccggaatcgtcattaaagacttacctgatcattttagtaattggcgagcaacacaatctcttaatagcttcctcgaatcacaaaaaacgatcggaatttcaaatattgatactagagcattgacaacacggttaagagatcatggatcattaaaagcatgtattgct

SEQ ID NO: 318984 - DNA, 796 bp, Unknown
  Bacterial polypeptide expressing nucleotide sequence isolated from the Sargasso Sea
tttgatacttgatgatggaaacttttttataggtagagcctttggtgctaatgttaccggcattggagagatttgttttaatacctcaataacaggttatcaagaaattattactgatccttcttattcaaatcaaataattaacttcacgtttcctcatattggaaatgtaggtactaattcagatgattatgaaagtaacggatcttatgcttctggtattgtgactagacaaattcctacaactagctctaactggaggtcaaagaatcaattcaacagttggttgaaggatttaaaaattccaggaatctccggaattgatacaagataccttacaaaattagttagacaaacagattctaagaatgctctattgttttctgatgattctgatgaatatgatttcaaaaaactctttagtatattgaaagaccatccttcaatgaagggatttgaattagcgtctaaaatttcaactaaaagtttatatacatggaatgagggaattcatatattgctcaaaaatttagataaaaagaaaaaaaagcttataacggcgtccaattcaatcaagatagtcgccttagattttggtattaaaaaaaatattctacgaaatcttttccatagaaatgcagatatagttgttttaccgcaagattctagttacgaggaggtaatgagttacaatccttcaggtgtttttttatcaaatggtccaggcgatccccaagctacaaaaaatactacttttcagatgattaataaattaataaataaaaagattcctatt

SEQ ID NO: 318985 - DNA, 223 bp, Unknown
  Bacterial polypeptide expressing nucleotide sequence isolated from the Sargasso Sea
attgaatcaatataattttagaaaaaaagcttttattcttcttaaagatggaactatttttcatggaaagtcaattggtattgaaggaactgcatatggagaattatgttttaatactggtatgacaggatatcaagaaatttttactgacccatcttacaatgggcaattaatggttatggctaatgtacatataggaaattatggtactaacaatgatgag

SEQ ID NO: 318986 - DNA, 853 bp, Unknown
  Bacterial polypeptide expressing nucleotide sequence isolated from the Sargasso Sea
ttgactttaaaacgaaaaaacaaaacctcacatttctcaaaacttaacacagctattttagttctcgaaaataaatcagtctttaagggtattgggctaggatatataggagaagcaacaggagaagtatgctttaatacctcattaacaggttatcaagaaataatatcagacccatcttatgctggacaaataataaattttacatttcctcatattggtaatgtgggagttaataatgaagacatagagtctgataaaatatggacgagaggagttatttttaattcagagataacaaatccgtctaattacaggtctcttcaaaatttagataaatggcttaaaaaaaataaaatagtaggcataactggtctagatactagaagtttaacaaattttataagagataagggtgctccaaaaggaactatatcaaacaataaaaatggtaaatttaatatcaataaactaataaataaatcaattaaatggcctggtttaaatggaatggatctggctcaaaaggtcactaccaaaaaaacttatatttggaaaggatataaaacttggaaaaaaaataagggttatgaaaaaaataaaaagaaaaaatttagggttgttgcaatagattatggaattaaaaaaaatatacttagatatttctctgactttgaatgtgaggttaaagttgtttcctgcagagaaaatgcaaataaaatacttaatctaaagcctcatggaatttttttatcaaacggtcctggcgatccagctgcaacaggaaagtatgcaattaaagtagtaaaaaatttaataaaagaaaatatcccattattggaatatgtttagg

SEQ ID NO: 318987 - DNA, 544 bp, Unknown
  Bacterial polypeptide expressing nucleotide sequence isolated from the Sargasso Sea
aatgtcattcaaagccatattagcatttgaagacggtagtgtattccatggaaaggggtttgggaaagaaaaatatgatgttggtgagcttgtatttaatacatctatgacaggctaccaagaaattgttacagatccctcatacaaaaaacaaataattactttcacacatccacatattggaaatactggtataaataaggaagataatgaatcaaaaactattcatgcctcaggaatggtagttaaaaacttttgtgacaaaccaagtaattggaggtcaaaatccactttaggcgaatttttaaaaaaaaatgaagttatagggatatcagacgttgatacaagggaaataacaacaattttaagagaaaaaggagcaatgaattgttgtattgcatcgctttcagtaatttctgataaagaagctgttgcaaaagcaaaggcatttgaaggtctaaaaggaatggatttagcaaaagttgtctccacagataaagaatataaatggaatgagggagttggcccgagaataataaattta

SEQ ID NO: 318988 - DNA, 337 bp, Unknown
  Bacterial polypeptide expressing nucleotide sequence isolated from the Sargasso Sea
gatgcagggatggattgcactagagaacggttctgttttttttggtgactcatttggttatccaaaaacagtggaaggagagcttgttttcaatacatcaatgacgggctaccaagaagctcttacagaccccagttatgcgggtcagattctaatgtttacatttcctcaaataggaaattatggttgtaacaaagaaaattacgaatccgaaaaaatacaaaccaaggcatgcatagtcaaagaatggtgcagacatccacatcaaggcgaagaaaactttgacgaatggttaaatcgagaaaagattccaggattggaagggatagacaccaga

SEQ ID NO: 318989 - DNA, 308 bp, Unknown
  Bacterial polypeptide expressing nucleotide sequence isolated from the Sargasso Sea
aactaaaaaaatgaatttaggtcatagaggtgctaatcatcctgttagaaatacaattaaaggaaatgttgaaataacgagtcaaaatcatggatttgagattgttaagaaaagtctgccaaaaaatattcaaattactcacctttctctttttgacgatagtatagaaggaataaaactaaagtctcagccagttttttctgttcaatatcatccagagtcaaatcctgggccacaagatagtgtttatttatttgaagaatttattaaatacatgaaagcaaatgccaaaaagaaaagatattaaa

SEQ ID NO: 318990 - DNA, 260 bp, Unknown
  Bacterial polypeptide expressing nucleotide sequence isolated from the Sargasso Sea
tcaaaatcttgaaaatataaaggtagaaatacaaagtcaaaatcacggattgaaagtagaggaaaaatctttgccaaaaaatttaaaattaactcatatttcattatttgataaaagtgtgaggggtgtggaggacaaaaataaaggagttttttcagtccaatatcatcctgaagcgagtcctgggccacaagatagtaaatacttatttataaaatttttaaaaaatataaaaaatgccaaaaagaaaagatattaaa

SEQ ID NO: 318991 - DNA, 174 bp, Unknown
  Bacterial polypeptide expressing nucleotide sequence isolated from the Sargasso Sea
atgttatcccaccacatgtaaatttaacgataaatacttctgaaggaatacgtggtaatgatattcctgctttttctgtacaatatcatccagaatctagccccgggcctcatgatagtagatatttgttcaatgattttatcaatatgatgaaaaatgccaaaaagaactgat

SEQ ID NO: 318992 - DNA, 730 bp, Unknown
  Bacterial polypeptide expressing nucleotide sequence isolated from the Sargasso Sea
ttgagacaggtcataaacaaaaaaaataaatcacacattttttctacaggtattttagtttttgaagatggcaccaaattttttggaacaggtattggctacgaaggatttgcggttggtgaagtttgtttcaatacatcaattactggttatcaagaaattttaacagatccatcttactctgatcagattataaatttcacatttcctcatattggtaatgtaggaacaaatatcgaagataacgaagctgataaagcttgggtgaagggagttattcttaattgtgatataacagaaccatctaattatagatctattaaaaaactgaatatttggctaaagaaaagaaaaattgtaggtattgtgggattagatactagagttattaccaattatataagagataaaggtgctcctaaaggaacgatacaatttttaaaaagcggaaatcataattttaaaaaacttttaaatgatgcaagatcctggaatggtttattaggattagacttagcaaaaaaagttacttgtaaaaagctttataaatggaaatctttaaagtcttgggataagaaaaagggatatgttaaaaataaaaaaaataaatataaaattgttgctattgattatggtattaaaaaaaatcaattaagatgtttttctgatattgattgtggagtaacaattgttccagcaaatttttctgcagataaaataataaaactta

SEQ ID NO: 318993 - DNA, 172 bp, Unknown
  Bacterial polypeptide expressing nucleotide sequence isolated from the Sargasso Sea
taaagaattaagagtaactcacaaatctttattcgatggtactgtacaaggaatagagcatacaaccttacccgcttttagttttcaaggtcatccagaagctagtcctggacctcatgacttaaaagacttgttccaaaaatttgaagacaacatgaagaaaaatgcctaa

SEQ ID NO: 318994 - DNA, 826 bp, Unknown
  Bacterial polypeptide expressing nucleotide sequence isolated from the Sargasso Sea
attgaacaaaaaacaaaaagtaaactcaaaaaaaaaatcaaattttagcccgggtattttagttcttgaaaataaatcaatttttaatggaattggtattggttatgaaggtactgctacaggagaagtgtgttttaatacctcaataaccggttaccaagaaataatttcagatccatcttatgcgggacaaattattaattttacctttccccacattggaaatgttgggaccaataagcaagataatgagtctgagaaagtctggacaagaggtgtgattttcaattcagaaataactaatccttcaaactacagatcattaattgagttagatttgtggcttaaaaaaaataaaattgttggtttaactggtttagacactagaagcttaacaaattttataagagataaaggcgcgccaaaaggaactatttctcataaaaaaaatggcgttttcccattaaaaaaacttattaatgcaactcttaaatggccgggtctaaacggactagatttggcaaagactgtgtctactaagaataaatttacatggaaagggcttaagacatggacaaaagaagacggttttaaaaagattgaaaaaaagaaatttagagtagttgcaattgattatggaattaaaacaaacattttaagatatttttcaaatttttattgcgatgtaatagttgtgccgtgtgatgcttcagctgaatatatcatgacacttaaaccaagtggaatttttttgtcaaacggccctggtgatcctgcagcgactggcaaatatgcaattaaaattataaaaagtcttataaaagaa

SEQ ID NO: 318995 - DNA, 829 bp, Unknown
  Bacterial polypeptide expressing nucleotide sequence isolated from the Sargasso Sea
ttgagacagttcataaacagaaaaaaaaataattcacataatttttctacaggtattttagtttttgaagatggcaccaagttttctggcaacggtataggctatgagggcattgcagttggagaagtttgttttaatacatcaataactggttaccaagaaataataacggatccttcttattcagatcaaattattaactttacctttcctcatattgggaatgttggaacaaacccggaggataatgaagcagaaaaggcttgggttaaaggagttgtgtttaattcgaatgttactgaaccatcaaattatagatctattaaaaagctagataagtggctaaaaaaaagaaaaatagttggcattgttgggttggacacaagggtaatcacaaattacataagagataaaggtgcgcctaaaggcaccattcaattttcaagaaaaggcaaacatgatctaggaaaacttttaaataaatctaaatcatggaatggacttttaggtttggatttagcaaaaaaagttagctgtaaaaatatttataattggtcttctctaaaatcttgggacaagaaaaaaggatatacaaaaaataaaaaaaataaatataaggttgttgctatagattacggtattaaaaaaaacatacttagatgcttctcagatatcaattgttctgtaaccgttgttccggcaaactattcagcagagaaaataattaaattaagaccagatggaatttttttatccaatggccctggggatccagcggcaacgggacaatatgccataccaataataaaaaaattaattactaatggaa

SEQ ID NO: 318996 - DNA, 435 bp, Unknown
  Bacterial polypeptide expressing nucleotide sequence isolated from the Sargasso Sea
aatggataagcatcaaaaacaggcgattttacttttagatgatggacgtgaattttatggaaattcatttggtcatcatggagaggcgacaggtgaagtttgttttaatactggtatgtctggctatcaagaaattcttactgatccttcatattgtaaacaaatagttacaatgacttcgccacacattggtaattatggtatcaataaagaagatattgaatcagataatgttcaggtcgctggctttgtaattaaagaagaatctgagatcccatcgaactggcgatcggaattatctattggaaaatatttagatcaacaaaaaatagttggaataaaagatattgatacaagggcattaacgcgttatatcagagataatggagcaatgaatggcattatatcatcaattgatgatgatataaaatcact

SEQ ID NO: 318997 - DNA, 838 bp, Unknown
  Bacterial polypeptide expressing nucleotide sequence isolated from the Sargasso Sea
aaaaaacaaaaaattaactcagcaaattatcatcgtttttacccaggcattttagttcttgaaaataaaactgtttataaaggcataggcattggctatgagggaactgccacaggagaagtgtgttttaatacatcattaacaggataccaagaaattatttctgatccatcatatgctggtcaaataattaattttacattcccacacataggaaatgttggaactaataacgaggatattgagtctgataaaatttggactaaaggaatcattctaaactctgaaataacaaatccttctaactatagatctttaaaaagtttagacttatggctaaaaaaaaataaaattataggtctcacaggactggatacaagaagcttaacaaattatattagagataatggcgcacctaaaggcactatttcatataataaaaaaggtaatttaaacataaaaaaactaataaataattctgtaaagtggactggattaaaaggactagatttagcaaaaacagttacaactaaaaaaaaatatatttggaaaggttttaaaacctggaaaaaagaaattggttatgaaaaaaataaaaaaaaatcctttaagatcgttgctatagattatggaattaaaaaaaatatattaagatatttttcaaattttagttgtgaagtgatagttgtgccttgtaatcttgaagctaaagagattattaaattgaaaccagatggtatctttttatcaaatgggcctggtgatcctgctgcaactggaaaatatgcaataaatataatccaaaaattaattaaaacaaatattccagtatttggaa

SEQ ID NO: 318998 - DNA, 191 bp, Unknown
  Bacterial polypeptide expressing nucleotide sequence isolated from the Sargasso Sea
tgaagaagattctttaccaaaagatttaaccattacccataaatccttatttgatggaactgttcagggaatagaacacaaaactttacctgcatttagttttcaaggtcatcctgaagcgagtccaggacctcatgatttaaaagatttatttcagaaatttgaagagaacatggaaaagcatgcctaaa

SEQ ID NO: 318999 - DNA, 144 bp, Unknown
  Bacterial polypeptide expressing nucleotide sequence isolated from the Sargasso Sea
tcgtcgcgggtcttgagctcgtggacggatctgccttcagtgtgcagtaccaccccgaggcggctgccggtcctcacgatgccgcgtacctgttcgatcgctttgcggaagccatcgctcgacgacgggatggtggtgcctgat

SEQ ID NO: 319000 - DNA, 298 bp, Unknown
  Bacterial polypeptide expressing nucleotide sequence isolated from the Sargasso Sea
attgagtcaatataattccagaaaaaaagcctttgttttattagaagatggtactattttccatggtaaatccattggtgttgatggaacagcttcaggtgaattatgtttcaatactggtatgacaggttaccaggaaatatttacggatccatcatataatggtcaattaatggttatggctaatgcccatattggtaattatggtactaatttagatgaggttgagtctgattcagtcaaaatagctggcttaatatgtaaaaattttagttttaatttttctagatatggtcaa

SEQ ID NO: 319001 - DNA, 523 bp, Unknown
  Bacterial polypeptide expressing nucleotide sequence isolated from the Sargasso Sea
aatgtcattcaaggcaattttagcatttgaagacggtagtgtattccatggaaggggttttgggaaagagaaatttgatgtaggtgaattagtcttcaatacatcgatgactggttatcaagaaattattacagacccgtcctataaaaaacaaattattacatttactcatcctcatataggaaataccggaatcaattatgaagacatggaatcaagtatcattcatgcttctggcatagttgtaaagaattattgttctaaaccaagtaattggagatcaaaagcctcgttggaaggttttttaattgagaacgaaattataggaatatcagaggttgataccagagaaattacaacactcttaagagaaaagggagctatgaattgctgtatagcatcttcaacactgataacggaagaagaggcaatctcagcagctaaagattttgatggccttaaaggaatggatttagcaaaagtagtatcaacagaatcaaaatatgaatggaataaaggcatt

SEQ ID NO: 319002 - DNA, 526 bp, Unknown
  Bacterial polypeptide expressing nucleotide sequence isolated from the Sargasso Sea
attgactataaaacgaaaaaaaaaagttccaattaaatctcaattttgtccagctattttagttcttgaaaacaagtctatttttagaggtattggactaggtcatcaaggcaatgcaacaggtgagatttgtttcaacacttcattaactggctatcaagaaattatatccgatccttcttatgcaggacaaataattaattttactttcccacatatagggaatgttggaactaacaacgaagatatagagtcagaaaaaatatggaccagaggtgttatttttaattcagagataaccaacccttctaattatagatcacttcaaaacttagatcattggttaaaaaaaaataaaattgtgggaataactggtttagatacaagaagtctaacaaattttataagagacaaaggtgctccaaaaggcactatatcaaataataaaactggtaattttaatatcagcaaactcattaatatttctaacaaatggccgggactcaacggcatggatcttgctaag

SEQ ID NO: 319003 - DNA, 833 bp, Unknown
  Bacterial polypeptide expressing nucleotide sequence isolated from the Sargasso Sea
attgatcaaaaaagtaaaaaaaactaactcaaaaaaaatttcagaaattaatacgggcgtcttagttcttgaaaataagagagtttttaaaggtattggaattggttatcaaggagatgcaacaggtgaggtttgctttaatacctcattaactggatatcaagaaattatatcagacccatcttatgctgggcaaattataaattttacctttcctcatattggaaatgttggaactaacaaagaagattttgaatctgataaaatatggacgaaaggggtaattattaattcagaaataacctcaccatcaaattatagatcttttcaacacttagatgcttggcttaagaaacataaaatagttggaattacaggtttagatactagaagtttaactaattttataagagataaaggagctcctaaaggaactattgcttattcaaaaaatggtaaatttaatctcagcaaacttactaactctacaataaaatggagtggactaaaaaatctagatcttgcagaaaaagtgactacaccaaaaaattatatttggaagggacttaaaacatggaaaaaagaagttggttataaaaaaaatagtaaaaattcttttcatgtagttgcaatagattacggaataaagaaaaatattttaagatatttttctgacttcaattgtaaagtaactgtagtttcgtgtaaaacatctgctgaaaaaattttagctcttaaaccaaatggtatatttttatcaaacggtccaggagacccggctgcaacagggaaatatgcaattaaaataaataaagatctgattaaaaaaaact

SEQ ID NO: 319004 - DNA, 415 bp, Unknown
  Bacterial polypeptide expressing nucleotide sequence isolated from the Sargasso Sea
tctggtgctcagcaacgggatgtttttccgtggtcgaatccatggtccttttcaggccacaggtgaactgatattcaatacctcgatgaccggttaccaggaaatcctcactgatccatcgtattgcggtcagatcgtaacgatgactgctccacatatcgggaattatggaaccaaccccgatgacatggaatcttcgaccatccatgcttctgctctggtggtaacccaactcacccagattccgagtaactggcgttccaataaatccctgtccgattttctctgggaatccaaggtgccggtgatggtaggagtggatacccgagcgctggttcgtgttttacgatccgacggagaagtcaaagggctgatggttccttcagactcgctgcacacccttgatcttttgcgg

SEQ ID NO: 319005 - DNA, 280 bp, Unknown
  Bacterial polypeptide expressing nucleotide sequence isolated from the Sargasso Sea
atgaccaaattttcaggactattgttattagaggatggaacaacttgggacgcgatagggttcggacaccagggctttggtgtgggtgaattatgctttaacactgcaatgactggttaccaagaaattatatctgacccgtcctatgcggagcaaataattacttttactttccctcatataggaaatgtaggtacgaataaaaaagataacgaatcaaataagccactagctacaggagtaattaccaaagcaaagccaacaactccatcgaatggag

SEQ ID NO: 319006 - DNA, 371 bp, Unknown
  Bacterial polypeptide expressing nucleotide sequence isolated from the Sargasso Sea
tatgaaaaaatttacggggatattaatattagatgacggctctgaatggttagctcaaggctatggatttgaaggatcaacagttggtgaactctgctttaatacagccatgacaggttatcaagaaattatctctgatccatcttatgctgaacaaattattgtatttacatttccccacattggaaatactggtataaataatcaagacaatgaatctgatcaaatagctgctaaaggaattgtcactagaacgtttccaacccaaccctctaattggagaagtaaatattctttggaaacctggttaaagaagcatagaatcgttgcagtgcacggcattgacacacgatctttaactcgaagaataa

SEQ ID NO: 319007 - DNA, 788 bp, Unknown
  Bacterial polypeptide expressing nucleotide sequence isolated from the Sargasso Sea
aaattctcacatttatcatcaggcgttttagttcttgaaaataaaacaatttttaaaggtattggtatcggatatcaaggaacagccacaggagaagtttgctttaatacttctttaacaggttatcaagaaattatatccgacccatcttatgctggacaaattatcaattttacttttccacatattggaaatgtcggtactaacaaagaagatcatgaatcagacaagatttggaccaaaggggttatttttaataccgaaataactaatccatcaaactacagatctttaaaaaaattggatagttggttaaaaaaaaataagatagtaggaataaccggactagatactagaagcttaactaattttataagagacaaaggagcacctaaaggcactatttctaataataataaaggtatttttaatctaaaaaaattaaccaatagttctattaaatggccaggattaaacggtcttgatttagcaaaaatagttacaactaaaaaaaaatatttatggaaaggtttcaaaacctggaaaaaagataaaggctttgaaaaaaataaaaagaagaaatataaaattatagcaatcgactatggaattaaaaaaaatattttaagatatttttctaattttaattgcgaagtaattgtagttccttgtagccttgaagctgaagatattattaaattaaaacctgatggtgtttttttatcaaatggccctggagatcctgctgcgaccggtaaatatgcaatcgatataatttcaaaattaat

SEQ ID NO: 319008 - DNA, 193 bp, Unknown
  Bacterial polypeptide expressing nucleotide sequence isolated from the Sargasso Sea
agtggatagatctagtttgccaaaaagtgtaatagaaacttatatttctttatttgatggctctaatgaaggaataaaacatataagtcttccaatattcagtgtgcaatatcatcctgaagcaagtcctggaccacatgatagttcttacctatttgaagaattttataaattagttgaaaaaaatgcctaa

SEQ ID NO: 319009 - DNA, 868 bp, Unknown
  Bacterial polypeptide expressing nucleotide sequence isolated from the Sargasso Sea
aatcttcaaaagatagactccaccgctattttaattctacaaaatggtaaattttttaaaggtattggattgggctacaaaggcaccgtaactggtgaagtatgttttaatacttcaattactggttaccaagaaataatttccgacccctcttatgcagatcaaattataaactttacttttcctcacgtaggtaatgttggaactaatcaagaggatcatgaatcagacaaaatatggactaaaggagtaataataaacactgaaattactaatccttcaaattacagatctttaaagcatttagatcaatggttacaaaaaaataagatagttggaataactggaattgataccagaaatttaacaaattatataagagataaaggcgctcctaaagggacgatatccttctataacaaaaaaaaattaaatattaaaaaactcattaaaatgactaataaatggagcggtcttaaaaacttagatttagcaaaacaagtttctactaaaaagaattatttatggcaagactataaaacctggaaaaaagagaatggatatttaaaaaataaaaaaaaattattacacgtagttgcaatagactatggaattaagaaaaatattttaagatatttttctgattttaattgcaaggttacaatcgtgccatgtaagacaactgcgaaagatattcttaaacttaatccaaatgggatattcttatcaaacggaccaggtgatcctgctgcaaccggaaaatatgcaataccgataattcaaaatttaataaaaaaaaaattaccattatttggaatctgtctaggtcatcaaatgctagctttagcacttggcgcaaagacagaga

SEQ ID NO: 319010 - DNA, 140 bp, Unknown
  Bacterial polypeptide expressing nucleotide sequence isolated from the Sargasso Sea
aggaataagattaaaaaataaaccagttttctcagtacaatatcatcctgaagccaatcctggaccacaagatagtaaatatttatttagtaattttattaaagacattaaaaaatatgccaaaaagaaaagacattaaa

SEQ ID NO: 319011 - DNA, 850 bp, Unknown
  Bacterial polypeptide expressing nucleotide sequence isolated from the Sargasso Sea
aggagagaaaaaggctgccgtatgtgagctttgttttaatacctctcaaacaggctatcaagaagcattatctgatccctcatatacaaaacaaatcattacatttacttttccacacgttggaattgtaggtacaaatcaagaagatcaagaatcaaaaaaaatctacgctgatggatgtgtaataaatcagccattatcagagtattcaaattggagagcagaaaatgacttaaattcatattttttaaagaacaagattccatgtatttttggacttgatactagatacttaactaagaaattgtctgttgagggtgctaagaaagccgcaattattcattttggagaagaccaaaataaagttgaaaaacttaaaactcaaataaatgagtggaaaggtcttcaaaatttagatttggcggggatagtatctacagagcaaaactataattggaaaaaaggaatatggaaaagtgataaatcaattaaaagtaaatttaaatataatgtcacttgtttagactttggtattaagaataacattttaagaaatctaaatgaatttaatcttaacccaactgtattaaacttattttctagctacgaagaaataatagaaactaatccttcaggaatttttttatcaaacggccctggtgatccttatgccacaggtagtaaaatagttgatgtgattaaaaaattaattgatgataatattcctatatttggaatatgtttagggcatcaaattttaggattggcattaaatgcgaagactaaaaaaatgtttcagggtcacagaggttcaaaccatcccgtcaaaaatcttactacaggcattgtt

SEQ ID NO: 319012 - DNA, 666 bp, Unknown
  Bacterial polypeptide expressing nucleotide sequence isolated from the Sargasso Sea
aatgtcattcaaggcaattttagcatttgaagatggaagtgtattccatggaaggggttttgggaaagagaaatttgatgtaggtgaattagtcttcaatacatcaatgactggctatcaagaaattattacagacccgtcctataaaaaacaaattattacatttactcatcctcatataggaaataccggcatcaattatgaagacatggaatcaaacatcattcacgcttctggcatagttgtaaagaattattgtgctaaaccaagtaattggagatcaaaagcctcgttggaggattttttaattgagaacgaaattataggaatatcagaggttgatacaagagaaattacaacactcttaagagaaaagggagctatgaattgctgtatagcatcttcatcactaataaccaaagaagaggcaatctcagcagctaaagattttgatggccttaaaggaatggatttagcaaaagaagtatcaacagaatcaaaatatgaatggaataaaggcatttggcctcaaaataaaaagtctgatgaatctttttcagtggttgcatatgattatggaattaaagagaatattttaaggctcctcactgagcatgttggaaaagtacatgtagtgaatgctaaaactccatttgaagaaattat

SEQ ID NO: 319013 - DNA, 336 bp, Unknown
  Bacterial polypeptide expressing nucleotide sequence isolated from the Sargasso Sea
gcctcgggcaccagatcctggctttggccttgaactgcaaaacctacaaactcaaatgcggacatcatggagggaaccatcctgtaatggattaccagaccagcaagattgagatcacaagccataatcatggattctctgtgaacgaggacagtctcccggaagacgtcagagtgacccataggaatctaaacgatcagacggttgaaggtcttgaatcgcttcagtaccctgcctattccgttcaataccaccccgaggcggcaccaggcccgagggatgcccgttatctcttcaaacgatttgttgagatgatgggaaacaccaagcgttgaa

SEQ ID NO: 319014 - DNA, 265 bp, Unknown
  Bacterial polypeptide expressing nucleotide sequence isolated from the Sargasso Sea
aatggtcagcaatggtcttctggtgctcagcaatgggatgtttttccgtggtcggatccatggcccctttcaggccacgggtgaactgatcttcaatacctcgatgaccggttaccaggagattttgactgatccatcatactgcggtcagattgtgacgatgacggttccccatatcggaaattatggaaccaaccccgatgatatggaatcttcgaccatccatgcttccgctctggtggtgacccaactcacccggattccg

SEQ ID NO: 319015 - DNA, 760 bp, Unknown
  Bacterial polypeptide expressing nucleotide sequence isolated from the Sargasso Sea
tttggtattggatatcaaggtgaagtaacgggagaagtttgtttcaatacatctttaacaggttatcaggaaataatatccgacccatcttacgctggtcaaatcataaattttacatttccacacattggaaatgttggaacaaataatgaagacttagaatcagataaaatttggacaagaggtgtaatttttaattctgaaataacaaatccttcaaactatagatcgctaaagcatttagatgggtggcttaaaaaaaataaaatagtaggaataacggggctagatactagaagtttaactaattttataagagacaaaggtgcgcccaaaggaactatttcaaataataaatcaggtaaatttaatataaaaaaactagtcaaaaaaactactttttggcctggattaaatggaatggatctagcaaaagaagtatcaactagaaaaaattatacgtggaaaggccttaagacatggagcaaagaagaaggttataaaaaaaataacaaaaaaaaatttagagttattgcaatagattatggcattaagaaaaatattttaagatacttttctaactttgattgtgaagtaaaagttgtatcctgtaaagaaagtgccgaaaatttattaaaactaaaaccacatggaatatttttatctaatggcccaggcgatccagctgccacaggtaaatatgcaataccaattgttcgaaaactaattaaatcaaatctaccggtatttggaatttgtc

SEQ ID NO: 319016 - DNA, 746 bp, Unknown
  Bacterial polypeptide expressing nucleotide sequence isolated from the Sargasso Sea
gacaggctatcaagaaactttgacagatccatcatatgcaaaacagattattacttttacttttcctcatataggtattgttggaacaaataatgaagatttagaatcatcaaaaatttatgctgaaggttgtattatcaatcaaactctagaacactattcaaattggagagcacaagatagtttaaattcttttttaaaaaataataatattcctgcaattacaggtattgatactcgatacttaactagaaaattatctttagaaggtgcaaaaaaagcagcattaattcattttggtgaaaaaaatcaaagtttagaagatttacaaaaacaattaaaacaatggaatggtcttgaaaatttggatcttgcaactttagtctctacaaagaaattttataagtggaatcatggcttatggaaaacagattttaaaaaggaaagttttgaacactttccaattgtatgtttagattttggaattaaacaaaatattttaagaaatttaaaaaatttgaattttaattctacaatcttgccagctgtaacgaatataaaagaaattttaagtaaaaaaccaaaaggtatttttttatcaaatggacctggagaccctgatgctactataaaattgatacttccaacaattaaagagcttatcaaccttgaaattcctatttttggcatttgccttggtcatcaattaataaatcttgccctcggtgcaaaaacaaaaaaaatgt

SEQ ID NO: 319017 - DNA, 727 bp, Unknown
  Bacterial polypeptide expressing nucleotide sequence isolated from the Sargasso Sea
atgaaaaatagtgtcaaaagaaatggaaaaaattgtattttgcttctcgatgatggttcttattttttaggtgttggctcaggatgctttggagattttttaggagaaatttgctttaatacttcaattactggctaccaagaaatattaacagatccatcgtattttaatcaaattattaactttactttcccacatattggggtggttggtgcgaattttgaggattatgaaagtgataggatttatgcctcaggctgcataattaacaatccagtatcaactgcttcaaattttagatctaaaatggattttgaaaaatggttgaaaattaataaaaaggtatgtgtttcaaatatcgacacaagagcactcaccaaaagaataagaaatttaggtgcgtgcaaggctttaattcatttccctgaaaatgctttttttgaaagtatttcaaatcttaaaaccaaattaacgaaatttcctagtatgaagaatctagatctagcatcagagatttcaaccagttatatatacaaatggtttaatcaaaaaaaattaagatcttttaaaattcataagaattttattgctgtcatagactttggtataaaaaaaaatattttaaatattctaagctcctctaaatatgatgtagtcgtttttccttacaacttttctctagtagagattattaaaatgaaaccagcaggcttgttctttcaaatgg

SEQ ID NO: 319018 - DNA, 208 bp, Unknown
  Bacterial polypeptide expressing nucleotide sequence isolated from the Sargasso Sea
aatcatggttttgctgttgattataagacagcagtttctaataaatctgtaaaaatatcacataaacacttaaatgatcaaacagttgcaggtcttgaaatcaaaggtaaagattgtttctctgttcagtatcatcctgaagctggtcctggcccaaatgatggtaattatctatttgatcaatttctatctaaactaaatcaatgat

SEQ ID NO: 319019 - DNA, 835 bp, Unknown
  Bacterial polypeptide expressing nucleotide sequence isolated from the Sargasso Sea
ttgaccacaaaacgaaaaaaaaataattcaattaaacctcaattttcttcagctattttagttcttgaaaacaaatcagtttatagaggaattggcttgggctaccaaggggaagcgactggtgaaatttgtttcaacacttctttaactggctatcaggaaattatatctgatccttcttatgctgggcaaattataaattttacttttcctcatattggtaatgttggaacaaataatgaggatttagagtctgataaaatatgggcaagaggggttatttttaactctgagataacaagtccatcaaattatagatctttaaaaaatttagatgaatggttaaaaaaaaacaaaatagttgggataactggacttgatactagaagcctaacaaacttcataagggataaaggcgctcccaaaggcacaatatcgaacaataaacagggtaattttaatattaaaaaattgattaatatctcaacaaaatggccaggtttaaatggcttagatttagcgaaagatgtaacaacaaaaaaagcatatacctggaaaggtttaaaaacttgggagaaaggtaaaggttttaaaaaaaataaaaagaaatcactaaggattgttgcaatagattatggcataaaaaaaaatattttaagatatttttcaaattatgattgcgaggtaaaagtagtttcatgcaaacaaactgctgaggaaatattaaagctaaaaccaaatggaatttttttatcaaatggtcctggagatccagcggctacaggaaaatacgcgattcaaacagtacaaaaattaattagctctaatttgccag

SEQ ID NO: 319020 - DNA, 181 bp, Unknown
  Bacterial polypeptide expressing nucleotide sequence isolated from the Sargasso Sea
tctattcctaaaaatgtaaagattactcataaatctttatttgatggaagtgttgagggtatagagcacaaaaataaaaaaatttttgcagtccaataccatcctgaagcaagtcctggacctcatgacagccagtatctttttcaaaaatttaaaaggatgattaatagtaatgcctaaa

SEQ ID NO: 319021 - DNA, 137 bp, Unknown
  Bacterial polypeptide expressing nucleotide sequence isolated from the Sargasso Sea
aattaaattgaaaaacaaacctgtcttttctgttcaatatcatccagaagcaaatcctggacctcaagatagtcaatatttattcaaaaactttattcaaaatataaaaaaacatgccaagaagaaaagacattaaa

SEQ ID NO: 319022 - DNA, 412 bp, Unknown
  Bacterial polypeptide expressing nucleotide sequence isolated from the Sargasso Sea
gacgcaatatttcggtccaagggccctggcgacccatccgcagtgggctatgcccacaagaccatcgaggccctgctgcccgaataccccgtcttcggaattggcctcggccatcaaatcctgacccatgccatcggtgccggtacctacaagctcaagttcggtcacaggggggcaaaccagccggtcaaaaacgtcgagtccgagaagggatccattacctcgcaaaaccatggatgcgcatccgacaaggaacagcttgagtcaatgggtgccatcgtcaccgaatacaacctgaacgaccagaccgtcaccggcatgcgcctcaaggagtcgcccgtatacaccgtccagtatcaccccgaggcctcccccggcccgaatgacgcaaatcacctctgccgggcctaac

SEQ ID NO: 319023 - DNA, 481 bp, Unknown
  Bacterial polypeptide expressing nucleotide sequence isolated from the Sargasso Sea
gttgaaaaaagatcatgcaacagctcgacctaaacctgtagaaggtcaacttattctagaagatggctcccattttaatggaattaaaattggctcacctaaaatggaaattggtgaggtgtgtttcaatacttcaatgacaggttatcaagagataataactgacccctcttatgcaggacaaataatcaattttacatttcctcatattggaaatgtgggcactaatcttgaagataatgagtcgagaaaaccatttgcgaaaggaataattattaattgcgatatttctgatccttcaaactataggtcaattcttcatcttgataagtggcttaaaaaaaataacgtacctggtatatgcaatattgatacaagattaattacaaatagaattcgttcaaaaggtgctccaaaaggtggaattatagaaggtccaataaatgataaaaaaactgccctctgtcttaaagaaataaaa

SEQ ID NO: 319024 - DNA, 181 bp, Unknown
  Bacterial polypeptide expressing nucleotide sequence isolated from the Sargasso Sea
ttagctttggctttaaatgcaaaaacaaaaaaaatgaaattaggtcatagaggtgccaatcatccagtcaaaaatttaataaataattcagttgagattacaagccaaaaccatggatttgttgttatagaaaaaagcttaactaaaaatattcaaattactcataagtcactttattgac

SEQ ID NO: 319025 - DNA, 673 bp, Unknown
  Bacterial polypeptide expressing nucleotide sequence isolated from the Sargasso Sea
attgactacaaaacgaaaaaaaaataattcaattaaacctcaattttctccagctattctagttcttgaaaacaagtcaatatttaaaggaattggcttaggctaccaaggaaacgccactggagaaatttgttttaatacttcgctaaccggctatcaagaaattatatctgatccatcttatgctggacagataataaattttacctttcctcatataggtaatgttggaacaaataatgaggatttagaatctgataaaatatggacaaggggggttatttttaattctgaaataactagcccatcaaattatagatccctaaaaaatctagatgaatggttaaaaaaaaacaaaatagtcggaataactgggcttgacactagaagcctaacaaattttataagagacaaaggcgctcctaagggcacaatatcgaacaataaaaatggtaattttaatattaaaaaattaattaatatttctactaagtggcctggattaaatggcttagatttagcaaaagatgtaacaacaacaaaaacttatacttggaaaggattaaaaacatgggaaaaagggaaaggttttaaaaaaaataaaaaaaaattattaagaattattgcaatagattatggaataaaaaaaaatattttaagatatttttctaat

SEQ ID NO: 319026 - DNA, 163 bp, Unknown
  Bacterial polypeptide expressing nucleotide sequence isolated from the Sargasso Sea
aatcactcataaatcattatttgataaaactatagatgggatgaaatcaaaagatcaaccgttgttctcagtacaatatcacccagagtctagtcctggaccacatgacagcagatatctttttgatgaatttataaatttaatggataaaaatgccagctag

SEQ ID NO: 319027 - DNA, 708 bp, Unknown
  Bacterial polypeptide expressing nucleotide sequence isolated from the Sargasso Sea
gatcctagttattacgggcagatattaacttttacttatccagagattggaaataccggcattaattatgaagattcagagtctaatattaatgttaaagggattattgttagaaatttttcctctaataatagtaattggagatctaaaaagaattttaatcaatggttagttgaaaaaaacattataggtcttcatggaattgatacaagagctcttgtaaaaattttaagatctaatggctctatgaatggagttattacctctgaggataaaactgtagaaagttgtttaaagataattcatgatatgccaaagatggaggggttgaatttatcaaaaatagtttcaacaaagcaacaatacttatgggaaagtcatacgcaaacaatttttgatttaagaaaaagacatattgaatcgtcaaaaaaattaaaaattgtagcaattgattttggaattaaaaattcaattcttaacagacttgtttctcatggttgtgaagttttggttttaccctctcgatcttctcttaatgatgttctgtctaataagccagatggtattttcttttcaaatggtcccggcgatccttcttctatttctgaaggtatagacttagcaaaatcacttattcaatatggtgagatacctatgtttggaatttgccttggccaccaaatatttggattagcattaggaggttct

SEQ ID NO: 319028 - DNA, 297 bp, Unknown
  Bacterial polypeptide expressing nucleotide sequence isolated from the Sargasso Sea
attgagtcaatataattccagaaaaaaagcctttgttttattagaagatggtactattttccatggtaaatccattggtgttgatggaacagcttcaggtgaattatgtttcaatactggtatgacaggttaccaggaaatatttacggatccatcatataatggtcaattaatggttatggctaatgcccatattggtaattatggtactaatttagatgaggttgagtctgattcagtcaaaatagctggcttaatatgtaaaaattttagttttaatttttctagatatggtca

SEQ ID NO: 319029 - DNA, 504 bp, Unknown
  Bacterial polypeptide expressing nucleotide sequence isolated from the Sargasso Sea
tttgtttaataaggaaaaaaaggcaaattcaaatcttttatcatcacaacccacaggtattctagtttttgaaaacggattatctattcctgcaataggtataggtcataaaggtcattcagttggagaaatttgttttaatacttcaatgactggttatcaggaaattataactgacccgtcttactctgatcaaattataaacttcacatttccccatataggaaatgttgggacaaacttcgaagatatagagtcagaaaagatttggttaaaaggtgttgtgtttgcaaaagaaataactgaaccctcaaattacagatcttttgaaaaacttaatctttggctagaaaaaaatcaaattgttggggtcgcaggtgtagatacaagagctattacaaatttaattagaaataaaggtgctttgaaagcaacaattgtgaatggtgatattactgatacaaaaaaataccttgaagagtgtaaaaactggcctggtttgaa

SEQ ID NO: 319030 - DNA, 223 bp, Unknown
  Bacterial polypeptide expressing nucleotide sequence isolated from the Sargasso Sea
ccatggatttgaagttgataaacaatcttttactaaaaatattattgaaactcataaatctttatttgatgataccaatgaaggaattaaacataaagaattgccattgttcagtgttcagtatcatcctgaatctagtccaggcccacatgatagtaattatttatttgatgaatttaaaaccttaataaaaaataatgccaaaaagaaaagatataaataa

SEQ ID NO: 319031 - DNA, 152 bp, Unknown
  Bacterial polypeptide expressing nucleotide sequence isolated from the Sargasso Sea
tatttcattatttgatggatcaaatgaaggtataaaacataagaatcttcctatatttagtgttcaatatcaccctgaggcaagtcctgggccgcatgacagttcttacctatttgaagagttttataaattgatagatgctcatgcctaaa

SEQ ID NO: 319032 - DNA, 647 bp, Unknown
  Bacterial polypeptide expressing nucleotide sequence isolated from the Sargasso Sea
attgacttcaaaacatagaaacaagaattcacatttttctaaatttaactcagctattttagttcttgaaaacaaatcaatatttagaggcaaaggcctgggttatcaaggagaagtaacaggagaggtatgttttaatacctctttaactgggtatcaagaaattatttcagatccatcttatgcagggcaaataatcaattttacatttcctcatataggaaatgttggaacaaataatgaggatattgaaagtgacaaaatttggactagaggagtaatattcaactctgaaataacaaatccttcaaattatagatctcttcaaaatttagataactggttgaaaagaaataaaatcgttggaataactggtctagataccagaggattaacaaattttattagagataaaggagctcctaaaggtacgatagcaaataataaaaatggaaaatttaatatacgtaagttgataaaaaaatcgataaattggcctgggttaaaaggtatggatcttgcaaaagaagtcacaacaccaaaaacttatacctggaaaggattaaaaacttgggaaaaaattaaaggatttgaaaaaaataagaaaaggaaatttaaaattgttgcgttagattttggaataaaga

SEQ ID NO: 319033 - DNA, 199 bp, Unknown
  Bacterial polypeptide expressing nucleotide sequence isolated from the Sargasso Sea
atagatagatctgaaacagaaaaaaataaacatattgaaatttcacatgtacatttaaatgataatactgtcgctggtataaagattaaaaataaaaaatgtttttcagttcaatatcaccctgaggcatcgccagggccaaatgattctaaatatttatttgatgaatttattaaactaattattgataaaaaataat

SEQ ID NO: 319034 - DNA, 174 bp, Unknown
  Bacterial polypeptide expressing nucleotide sequence isolated from the Sargasso Sea
agcaaccggtaaatatgctattaaaattgttaaagaattaattaataaaaacttacctttatttgggaattgtttaggtcatcaaatacttgctctagcattggggggtaaaacaaaaaaaatgaaacttggtcatagaggggctaaccatccagttaaaaatttaattcatga

SEQ ID NO: 319035 - DNA, 316 bp, Unknown
  Bacterial polypeptide expressing nucleotide sequence isolated from the Sargasso Sea
aatgtcattcaaagcaatattagcatttgaagacggtagtgtattccatggaaagggatttgggaaagaaaaatatgatgttggtgagcttgtatttaatacatctatgacaggctaccaagaaattgttacagatccctcatacaaaaaacaaataattactttcacacacccacatattggaaatactggtgtaaataaggaagacaatgaatcaaaaactattcatgcctcaggaatggtagttaaaaacttttgtgagaaaccaagtaattggaggtcagaagccactttaggcgaatttctaaaaaaaaat

SEQ ID NO: 319036 - DNA, 415 bp, Unknown
  Bacterial polypeptide expressing nucleotide sequence isolated from the Sargasso Sea
atgtccgtattagataataaaactatacttaattatcaaaacggatatttaatttataacaaaaaatatattttcaaaggtaagtttctatcaaaagatcaatttaaaatagcagaaatttgctttaatactagtatgactgggtatcaggagattttaactgatccctcatataaatctcagttcataaattttacctttccattaattggtattgttggatgtaataatgaagattatgagtcatggaaaatacatgcatcaggcttaatttgtaatgaattatttgagtcaagttcaaattggagagcgcaatcaaattttgcaaattggataataaatcaaaattcttgcgctttttttgatttagatacaagagcagtaactaaaattataagaaactttggaccgcaaa

SEQ ID NO: 319037 - DNA, 274 bp, Unknown
  Bacterial polypeptide expressing nucleotide sequence isolated from the Sargasso Sea
atgtctttcaaagccatattagcatttgaagatggtagtgtattctatggaaagggttttggaaaagaaaaattcgatgtaggcgagcttgtttttaatacttccatgacaggatatcaagagatcattactgacccatcatataaaaaacaaattattacttttacacatccgcatattgggaatacaggaataaacaaagaggataatgaatctaaagtaattcatgcctctggtatggttgttaaaaacttttgtgaaaaacccaagtaat

SEQ ID NO: 319038 - DNA, 259 bp, Unknown
  Bacterial polypeptide expressing nucleotide sequence isolated from the Sargasso Sea
catgaaaaacgatattttatctaataaagctacggcttgcctcgcactagcagacggaactttattttttggcaaaggcttcggatcaactggtgaaacaaccgctgaactctgctttaatacatcaataacaggatatcaggaaattcttactgacccttcttatgcaagtcaaattgtgacctttacatttccgcatattggcaatgttggggtaaacactgaagacgctgaaactcagaaccccgctgccgaaggc

SEQ ID NO: 319039 - DNA, 451 bp, Unknown
  Bacterial polypeptide expressing nucleotide sequence isolated from the Sargasso Sea
tatgggaaaatttaccggtatactaatattagatgatggttctgaatggccagcttttggttatggatttcaaggtgcaagaattggtgaaatttgcttcaatactgccatgactggttatcaagagattatctctgatccctcttacgctgaacaaattatcgtctttacttttccacatattggaaataccggaaccaataatcaagacaatgaatccgattatcctgttgctaaaggaattataaccagaaccattcctacccaaccctctaactggagaagtgaatattcactagaaagctggctaaaaaaacataaaattgttgctttgtatggcatagacactcgatctataactaaaagaataagagaatttggagcttgtaacgcaattatacactacaaaaaggatggaacccatgacatcccagccttaagaaaaagttaa

SEQ ID NO: 319040 - DNA, 423 bp, Unknown
  Bacterial polypeptide expressing nucleotide sequence isolated from the Sargasso Sea
aatgtcattcaaagccatattagcatttgaagacggtagtgtattctatggaaaggggtttgggaaagaaaaatatgatgttggtgagcttgtatttaatacatctatgacaggctaccaagagattgttacagatccctcatacaaaaaacaaataattactttcacacatccacatattggaaatactggcgtaaataatgaagataatgaatcaaaaactattcatgcctcaggaatggtagttaaaaacttttgtgacaaaccaagtaattggaggtcaaaagccactttaggcgaatttttaaaaaaaaatgaagttattgggatagcagacgttgatacaagggaaataacaacaattttaagagaaaaaggagcaatgaattgttgtattgcatcgctttcagtaatttctgataa

SEQ ID NO: 319041 - DNA, 625 bp, Unknown
  Bacterial polypeptide expressing nucleotide sequence isolated from the Sargasso Sea
atgaccgtattagataataaaattaaactaaattatcaaaacggttacctaatttataataaaaattatattttcaaaggcaagtttctgtcaaaagaggaattcaagatagccgaaatctgtttcaacactagtatgactggttatcaagaaattttaactgacccttcgtataaatcccaatttataaactttacttttcccttaataggaatagttggatgtaatgatgaggattatgagtcttggaaaatacatgcatctggccttataagtaatgaattatttgaattaagctcaaattggagagctcaaactagttttacgaaatggatattagatcaaaattcttgtgctttttatgatttagatacaaggtctctaacaaaaattataagaaatttaggaccaaaaaatattatgctatgcactgaaaattacttcaaatctaaaaatattgaagaaatttgtgcacaaatcgatcaaagtctttctttagaagaaaacgatgtaattaaagattttacatcagagctaaatattaaagataaggaaacaaagaaaaaaaaatactctattgcttttttaaactttggtgcaaaagatataatattaagaaaaattt

SEQ ID NO: 319042 - DNA, 853 bp, Unknown
  Bacterial polypeptide expressing nucleotide sequence isolated from the Sargasso Sea
tttgagacagactaaaaacaaaaaaaaaaataattcatataatttttcaacaggtattttagtttttgaggatggcaccaaattttttggcaaaggtattggctatgaaggaagtgcggttggagaagtttgctttaatacttctataactggttatcaagaaattattacagacccgtcttattcagatcagattataaattttacttttccacacattggtaacgtcggtacaaacccagaagataatgaggctgataaagcttgggttaaaggtgttattcttaattgcaacataacagaaccatcaaattacagatccataaaaaaattagatatttggcttaaaaaaagaaaaattgttggggttgtaaatttagatactagaataattacgaattatataagagacaaaggtgctcctaaaggaataatacaattttcaaagaaaagtaaacataatataaaagagcttgtcaaaaaatccaaatcatggagggggcttctaggtttagatttagctaaaaaagtaacttgtaaaactagttatacttggaattcttatcagtcttgggataaaaaaagggggtacttaaaaaataaaaaaaatctattcaaaattattgcaatcgattatggaattaaaaaaaatcagttgagatgtttttctgatattaattgcaaggttattgttgtacctgcaaattattcggcagaaagtataatgaattttaagccagatggtgtttttttatctaacggtccaggtgacccagctgcgactggaaaatacgctattccaataataaaaaaattgattgagtataaaattccaatttttggtatttgtcta

SEQ ID NO: 319043 - DNA, 871 bp, Unknown
  Bacterial polypeptide expressing nucleotide sequence isolated from the Sargasso Sea
ttgaacaaaaaacaaaaaaataaaattgcaattaaacatcaatttccaacaggtattttagttctagataataagcaagtttttagaggtattggacttggatatcaaggcactgctactggagaaatttgttttaacacctctttaacaggatatcaggaaattatttcagatccatcatatgctggacaaattattaactttacattccctcatattggaaatgttggaaccaataatgaagatttagagtctgataaagtttggacaaaaggtgtaatattcaattctgaaataacatcaccttcaaattatagaactttgaagactttagatgaatggctgaaaaaaaataagattgttgggcttactggattagatactagaagcctaacaaatttgattagagataaaggtgctccaaaaggcactatttcgaatgatacaaaaggaaaattcaaccttaaaaaactaatcaatatgtcaattaaatggcctggtttgaatggtctagatcttgcaaaagaagtatcaacaaaaaaaacttatatttggaaaggttttaagacttggaaaaaagaaattggttacgaaaaaaatattaaaacaaaatttagaattgttgcaattgattatgggatcaagaaaaatattttaagatatttttcagaatacaattgtgaggtaaaagtggtctcgtgtaaaacagatgcagatgaaatagtgaaattaaatccagatggtatttttttatcaaatgggcctggagatcctgcagcaactggagagtatgcaatttgcaatataaaaaaattaataaaattgaattaccccaatttttggaatttgccttggtcatcaaaattttagc

SEQ ID NO: 319044 - DNA, 434 bp, Unknown
  Bacterial polypeptide expressing nucleotide sequence isolated from the Sargasso Sea
aatggtaaactgggtttctaaaaaaccaacgggcgcattagtattaagtgatggcactattttcaaaggttttggatttggagctatcggaagatcttcgggagaagtctgctttaatactgcaatatctggttatcaggaaatcatgactgacccatcttattgttcgcaaataatcacttttacatttccacatataggaaatgtaggtctaaatctagaagataatgaaagctcagacaggccttatattagcggtgcaatatttcgatccctaataactgacccttcaaattggagatctgaaattgatttaggtaattggctaaaggataattcaatagttggtatctatggaatcgatacaagagctctaactaatttaattagagaaaaaggacttataaatggcactatagttcatgataataatg

SEQ ID NO: 319045 - DNA, 676 bp, Unknown
  Bacterial polypeptide expressing nucleotide sequence isolated from the Sargasso Sea
tttgagtcaatacaaacctagaaaaaaagcttttgttttacttgaggatggaactattttccatggaaaatccattggaattgatggaactgcttttggtgaattgtgctttaatacaggcatgactggctatcaagaaattttcacggatccatcatacaatggtcaactaatggttatggcaaacgcccatattggtaattatgggacaaatttagatgaagtagaatcagattctgtcaaaattgcaggtcttatttgtaagaactttagttttaacttttccagacacggtgattcaacatcactctttgattttttatcctcaaataaaatagtatgtatatctgatgttgacacaagagcattagtaagttatataagagataatggagctatgaatgcggtgatatctacagaatccattgatacaattgataaaataaaaaaacaactttcaaaagttccttccatgaatggtctagagcttgcttccagagtatcgactaataagtcttactattttggtgataaaaattctaaatataagatagctgtacttgatttaggagtaaaaatgaatattcttaaaaatctttcaaaaagaaatgcttatatgaaagtttttccacacaatactaaatatgaggatatgaagaaatggaatcctgatgca

SEQ ID NO: 319046 - DNA, 840 bp, Unknown
  Bacterial polypeptide expressing nucleotide sequence isolated from the Sargasso Sea
attgatcaaaaaagcaaaaaaaacaaactcaaaaaattcacagattaatacaggcgttttagttcttgaaaacaaaaaggtttttaaaggtattgggattggctatcaaggagaagcaactggagaagtttgctttaatacctctttaaccggttaccaagaaataatttcagatccttcttatgcaggtcagattataaattttacttttcctcatattggaaatgttggaactaataaagaagatgtcgagtctgataaaatttggacaagaggagtaatctttaactcagaaataacttctccttcaaattatagagcatttcttcatttagatgcctggctcaaaaaaaataaaattgtaggaattacaggactagatacaagaagtttaacaaactttattagagataaaggcgcacctaagggaacaattgcttactcaaaaaatggtaagtttaatgttagtaaattaacaaattcaaccattaaatggagtggtttaaaaaaccttgatcttgcagaaactgttacaacttcaaaaaactatatttggaaagggcttaaaacttggaaaaaagaaataggatttaaaaagaatacaaaaaacctttttcatgtagttgcaattgattatggaataaaaaaaaatattttaagatatttttcagactttaaatgtaaagtaacaattgtttcttgtaaaacctctgcagaaaaaatattagatcttaatccaaatggaatttttttgtccaatggtcctggtgatccagcagcgacaggaaaatatgcaatagaaatacttaacaaattaatcaataaaaatttacctatatt

SEQ ID NO: 319047 - DNA, 331 bp, Unknown
  Bacterial polypeptide expressing nucleotide sequence isolated from the Sargasso Sea
atgtcattcaaagccatattagcatttgaagacggtagtgtattctatggaaaggggtttgggaaagaaaaatatgatgttggtgagcttgtatttaatacatctatgacaggctaccaagaaattgttacagatccctcatacaaaaaacaaataattactttcacacatccacatattggaaataccggtgtaaatgaggaagataatgaatcaaaaactattcatgcctcaggaatggtagttaaaaacttttgtgacaaaccaagtaattggagatcaaaagccactttaggcgaatttttaataaaaaatgaagttatagggatag

SEQ ID NO: 319048 - DNA, 103 bp, Unknown
  Bacterial polypeptide expressing nucleotide sequence isolated from the Sargasso Sea
agcgtttagctttcagggccatcctgaagccagtcctggtccacacgaagccagtgaattgtttgaccactttatcgaattgatgcaacagcgtcaggcttaa

SEQ ID NO: 319049 - DNA, 178 bp, Unknown
  Bacterial polypeptide expressing nucleotide sequence isolated from the Sargasso Sea
ataaaagagtctaaatcgttagaattaactcatgttaacttaaatgatgaaacagttgaaggaataagggttaaaggtaaaaaggcattttctgttcagtatcatccagagtcatcaccaggtccccatgattctagatatttatttgatgattttataaatatgattaagaagtgag

SEQ ID NO: 319050 - DNA, 550 bp, Unknown
  Bacterial polypeptide expressing nucleotide sequence isolated from the Sargasso Sea
atgaaaaatagtgtcaaaagaaatggaaaaaattgcattttgcttctcgatgatggttcccattttttaggtgttggttcaggatgttttggagattttttaggtgaaatttgttttaatacttctatcactggctaccaagaaatattgacagatccatcatatttcaatcaaattattaacttcacttttccacatattggggtcgttggtgcaaattttgaggattatgaaagtgataagatttatgcctcaggttgcataattaacaatccagtatcagctgcttcaaattttagatctaatatggattttgaaaaatggttgaaacttaacaaaaaggtatgcgtttcaaatattgacactagagcactcactaaaagaataagaaatttaggtgcgtgtaaagcattaattcatttccccaaagattcttattttgaaaatatgaaaaatcttaaaactaaattgatgaaattccctagtatgaagaatttagacttagcatcagagatctcaacgagttatatatacaagtggtttaataaaa

SEQ ID NO: 319051 - DNA, 838 bp, Unknown
  Bacterial polypeptide expressing nucleotide sequence isolated from the Sargasso Sea
ttgaacaaaaagcaaaaagtaaattcaacaaaattttcaaatttatcatcaggtgttttagttcttgaaaataaaacaatatttaaaggtattggcataggatatcagggaacagcaacaggagaagtttgcttcaatacttctctaacaggttatcaagaaattatatctgatccatcatatgcagggcaaattattaattttacttttccacatattggaaatgttggtaccaacaaagaagatcatgagtctgacaagatttggacaaagggagttatttttaatactgaaataactaatccatcaaattacagatctttaaaaaaattggataaatggctgaaaaaaaataaaattgtaggaataacgggattagatactagaagcttaactaattttataagagacaaaggtgcgcccaaaggtacaatttcaaataataataaaggtatttttaatctaaaaaaattaactaacaactcgattaaatggccaggattaaatggacttgatttagcaaaaacagttacaaccaaaaaaatctatatatggaaaggttttaaaacttggaaaaaggaaaaaggttttgaaaaaaataaaaagaagaaatacaaaattgttgcgattgattacggaattaaaaaaaatatattaagatatttttctaattttaactgccaagtaattgttgttccttgtaactttggagtacaggatattttaaaattgaaacctgatggaatttttttatcaaatggccctggagatcctgctgcaacagggaaatatgctatagaaataattcaaaaattaattaaaacaaatattccaatat

SEQ ID NO: 319052 - DNA, 196 bp, Unknown
  Bacterial polypeptide expressing nucleotide sequence isolated from the Sargasso Sea
aagcttacctaaaaatgtaattattactcataaatctttatttgatgggtcaattgagggaataagattaaaaaataagccagcattttctgttcagtatcatcccgaagcaaatccaggacctcaagatagtcaatatttatttgatcagtttataaaagaaataaaaaaacatgccaaaaagaaaagacattaa

SEQ ID NO: 319053 - DNA, 157 bp, Unknown
  Bacterial polypeptide expressing nucleotide sequence isolated from the Sargasso Sea
acgcataaatctctttttgatggaacggtacaaggtatagaacatacatctaaacctttttttagctttcagggccatccagaagcaagtcctggacctcatgacttgaaatacctttttgatagattcgaagacaacatgaaaaaaaatgcctaga

SEQ ID NO: 319054 - DNA, 113 bp, Unknown
  Bacterial polypeptide expressing nucleotide sequence isolated from the Sargasso Sea
ggtgtttggcatccagtaccacccggaggccagccccggaccccacgacgcggatcaccattttggtcgcttcgttgcgttgatggcggatcgtcgggacgtcggtggttgac

SEQ ID NO: 319055 - DNA, 391 bp, Unknown
  Bacterial polypeptide expressing nucleotide sequence isolated from the Sargasso Sea
tctgcctaatattaaggctattattgaatcaggaatacctgttttaggcatttgtttagggcatcaattaatagcgaaatcattaggggttgaaacattcaaattgccatttgggcacagaggaggaaatcagcctgttaaggatataaaaaagaatagggtttatgtcactgctcaaaatcatggatatgcagtttcatctatcgataatcacgaatatttagaagtaactcatattaatatgaacgatggaacagtttctggtttgatgcataaaaaattacctgttttttcaattcaatatcattctgaagcatctcctgggcctaaagattctgagtatatttttgatgaatttattaaaaaaattaaagaaataaaggataaataa

SEQ ID NO: 319056 - DNA, 712 bp, Unknown
  Bacterial polypeptide expressing nucleotide sequence isolated from the Sargasso Sea
aatgccttttcctgccattttagttttagaagatggaactgttattgaaggcactgggtttggcgcaacagagccatcagttggtgaaattgttttcaatacctcaatgtcaggttatcaagagattattaccgatccatcatatgctaaacaaattatagcttttactcacccccatattggaaataccggaataaataatgaggacaatgaatctgatagcatttttgcttccggaatcgttattaaagacttacctgatcattttagtaattggcgagcaacacaatctctaaacagtttccttgaatcaaatgaaatcattggaatttcaaatattgatactagagaattgacctcaaagttaagagatcatgggtcattaaaagcatgcattgctcctggagatcaagattctttatcaatcgcccaagaagctatggataaatttagtggattagaaggtcttgatctggcgaaggaggtatcaactaaaaattcttactcttgggatgagggcacctggccaaattaccaagaggttaaaaatgagcaacttatcgttgcggttgattttgggataaagaggaatattttaagacttttgaggaaacatgtagggaaggtacaagttgtaaacgcagaaataagttttgatgaactcatggaccttaaaccagatggggtatttttatcaaatggaccaggagat

SEQ ID NO: 319057 - DNA, 262 bp, Unknown
  Bacterial polypeptide expressing nucleotide sequence isolated from the Sargasso Sea
aaaaatttgataaaaggcaatgtagaaatcactagccaaaatcacggatttgaaatagttaaaaataatcttccaaaaaatattcaaataactcatcaatctctgtttgataatagtattgagggaataagattaaaatctaaaccagttttttctgttcaatatcatcctgagtctaatcctggaccgcaggatagtgtttatttgtttaaggagtttgtaacctgtatgaaaaaaaatgccaaaaagaaaagatattaaa

SEQ ID NO: 319058 - DNA, 826 bp, Unknown
  Bacterial polypeptide expressing nucleotide sequence isolated from the Sargasso Sea
ttgatcaaaaaagtaaaaaaaactcacttaaaaaattcacaaaattatacaggtattttagttcttgaaaataaaaggttatttaagggaattggtattggataccaaggagaagcaactggcgaagtttgttttaatacttctttaacaggataccaagagataatgtctgatccttcttacgcagggcaaataattaacttcacctttcctcatattggaaatgtgggaaccaacaaagaagattttgaagccgataaaatatggacaaaaggagtaatttttaattctgagattacctcaccatcaaactatagatcctttcaacacttagatgcttggttaaaaaagaacaagatagttggaattactggacttgatacaaggagtttaacaaatttcatcagagataaaggtgctccaaaaggaaccattgcttactcaaagaaaggtaaatttaacgttaataaacttactaactctacaataaaatggagtggattaaaaaatttagatcttgcaaaaaaagtcactacacaaaaaaattatatttggaaaggacttaaaacctggaaaaaagaacacggttatagaaaaaataaaagaaattcatttcatgtagttgcaatagattatggaataaaaaaaaatattttaagatatttttctgatttcaattgtaaagttactgtagttccttgtaaaacatctgcagaaagaattttagctcttaaacctaacggtgtctttttatccaacggaccaggagatccagcagcaacaggaaaatatgctgttaagataattcaaaatcttgtcaaaaaaa

SEQ ID NO: 319059 - DNA, 283 bp, Unknown
  Bacterial polypeptide expressing nucleotide sequence isolated from the Sargasso Sea
tatgaaaatgccattcggacatcacggtgccaatcatccggtacatgacttaggtactaacgaggtctttatcacatcccaaaatcataactttgctgtagaagaaccaattaataatgacagtattaaaattactcataaatcactatttgataggactattcaaggattagctcacaaagaaaaaccattttattcaattcaatgtcatcctgaagcaagtcctggaccaaaagaatttgaagtgctttttagaaaattttttaaggaaatgaatgcctaa

SEQ ID NO: 319060 - DNA, 397 bp, Unknown
  Bacterial polypeptide expressing nucleotide sequence isolated from the Sargasso Sea
atgtcattcaaagccatattagcatttgaagacggtagtgtattccatggaaaggggtttgggaaagaaaaatatgatgttggtgagcttgtatttaatacatctatgacaggctaccaagaaattgttacagatccctcatacaaaaaacaaataattactttcacacatccacatattggaaatactggtataaataaggaagataatgaatcaaaaactattcatgcctcaggaatggtagttaaaaacttttgtgacaaaccaagtaattggaggtcaaaatccactttaggcgaatttttaaaaaaaaatgaagttatagggatatcagacgttgatacaagggaaataacaacaattttaagagaaaaaggagctatgaattgttgtattg

SEQ ID NO: 319061 - DNA, 832 bp, Unknown
  Bacterial polypeptide expressing nucleotide sequence isolated from the Sargasso Sea
ttggaaaatggtgaagttttgtggggctatggcttaggtgttaaaaaagccattgtaggcgaactttgttttaatacatcgcaaactggttaccaagaggctttaactgatccatcttatacaaaacaaattattacatttacttttccacatattggaatagttggcactaattcagaagatcaagagtctaataaaatttatgcagatggttgtataattaatcaaccaactaacttttattctaattggagagctgataacgatcttaatacatattttattaataataatattccatgtttgtatggagtagatactagatatttaactaaaaaacttgcagctgatggtgcaatgaaagctgctcttatacattttggaaaaacaaaagaatcattagataattttaaaaatgagataagtaattggtcagggttagaacatttagatttagcaagtgttgtgtcaactgatgaaaagtatgaatggaatgaagcgacttggcttaacaagaatagtaataattttaagaaaaagtataatgtaacttgtttagattttggtattaaacataatatattaagaaatcttcacgaatataacttaaatccgacagtattaaatttatcctcaagttttgaggaaattttaaataccaaacctgatggaatatttttatcaaatgggcccggtgatccatttgccacaggtgaaaaaattattaaaactttaaaaaaattaattgaaaatgaaataccaatttttggaatttgtttaggccatcaaatattaagtatggctttaggtgcaaaaacaaaaaaaatgtttc

SEQ ID NO: 319062 - DNA, 366 bp, Unknown
  Bacterial polypeptide expressing nucleotide sequence isolated from the Sargasso Sea
tacctgttttaggcatatgtttaggtcatcaattaatagcaaaatcattgggagcctccacatttaagcttccttatggacataggggaggaaaccaaccagtaaaggatattagtacaaataaggtatatgttacagctcaaaaccatggttacgctgtttctgatgataaaatcccagatcaactagaaataactcacttaaatcttaatgatggaactatttcaggtttatgtcacaagactttacctgttttttcaattcaatatcattctgaagcatcacctgggccaaaagactcagagtatatttttgatcaattcattgaaaaaattataagcagaaagaaaaaaaatgaaaaataat

SEQ ID NO: 319063 - DNA, 277 bp, Unknown
  Bacterial polypeptide expressing nucleotide sequence isolated from the Sargasso Sea
catcctgtgaaggatttgttgactagcaaagttgaaattacaagtcaaaatcatggttttgaagttgatgaaaaatctattccaaaaagtgtaaaagtcactcataaatctttatttgacggaagcattgagggtattgaggtaaaaagtaaaaaattattttctgttcagtatcatccagaggcaaatccgggaccacaagatagtaaatatttattcgaaaaatttttaaataacataaaaatgaaaaaaaatgccaagaagaaaagatattaaa

SEQ ID NO: 319064 - DNA, 241 bp, Unknown
  Bacterial polypeptide expressing nucleotide sequence isolated from the Sargasso Sea
caaggtagtttacataaccagtcaaaatcatggtttcgcagtcgattcatctagccttcctaaaaatatagagcctactcacatctcactttttgataagagtttgcaaggcattacttttaaagataaacctgcgtttagctttcaaggacacccagaagccagtccaggacctcatgaattagaggagctgtttacaaaatttaatttaatgattgaaagctatgccaaaaagaactga

SEQ ID NO: 319065 - DNA, 370 bp, Unknown
  Bacterial polypeptide expressing nucleotide sequence isolated from the Sargasso Sea
aatgtcattcaaagccatattagcatttgaagacggtagtgtattccatggaaaggggtttgggaaagaaaaatatgatgttggtgaacttgtattcaatacctctatgacaggctaccaagaaattatcacagacccctcatacaaaaaacaaataattactttcacacatccacatattggaaatactggtataaatgaggaagataatgaatcaaaaactattcatgcctcaggaatggtggttaaaaacttttgtgacaaaccaagtaattggaggtcaaaagccactttaggcgaatttttagaaaaaaatgaagttatagggatatcaggtgttgatacaagggaaataactacaattttaaga

SEQ ID NO: 319066 - DNA, 282 bp, Unknown
  Bacterial polypeptide expressing nucleotide sequence isolated from the Sargasso Sea
attgaccacaaaacgaaaaaaaaagaattcaattaaacctcaattttctccagctattttagttcttgaaaataaatcaatattcaaaggaattggcttaggataccagggaaatgcaactggtgaaatttgttttaatacttctttaactggctaccaagaaatcatatctgacccatcatatgctggacagattataaattttacttttccgcatattggtaatgttggtacgaataatgaagatttagaatctaacaaaatatggacaagaggggttat

SEQ ID NO: 319067 - DNA, 538 bp, Unknown
  Bacterial polypeptide expressing nucleotide sequence isolated from the Sargasso Sea
ttgagacacctagttaacttaaatgcagaagttaatgttttctcagaaaatgcttctattaaggatataaataatttcaagccagatggtatttttttatcaaacggtcctggagatccatcagcaacagaaataaaatgtagaaaactattaagtgctttatttcaacttaaaattcctgtttttggaatatgtattggtcatcaattaattgggctatcgtttggagcgaaaacaaataaaatgcctcaaggtcatagaggagctaatcatcctgtcaaaaatatatttaaaaataaagttgagattaccagtcaaaaccatggatatcaaatagacttagattctttgccaaattgtttagaagtgacccatacttctttatttgacaactcaatagaaggtataagacataaatcattaccgattttttcagttcagtaccatccagaagcttctcctggaccaaccgagtcatcttacttgtttaatgaatttttaaacttaattagagaatcaaaaaatgccaaaacgtaaa

SEQ ID NO: 319068 - DNA, 319 bp, Unknown
  Bacterial polypeptide expressing nucleotide sequence isolated from the Sargasso Sea
ttgggtgctaagacagaaaaaatgaaactaggccatagaggtgcaaatcatcctgttaaaaatttaattgagggtaaggtcgaaataacaagtcagaatcacgggtttgaagtagtaaaaaaaggtttgcctaaaaatgtaagaattactcaccagtctttatttgacaacagtattgagggtattgagttaaaaaataaacccgttttctcagttcaatatcatccagaatctaatcctggtcctcaagatagtatttatttatttgataaatttgtgaagagtatgaagaaaaatgccaaaaagaaaagatattaaa

SEQ ID NO: 319069 - DNA, 469 bp, Unknown
  Bacterial polypeptide expressing nucleotide sequence isolated from the Sargasso Sea
gagcattagcgcagaagagatacaaaaaaagaatccagatggaatttttctttccaatggtcctggagatcctcaaatcttagctgaacctataaaagaagttaagaaaatgatgcagcttgatattcctatatttggtatttgtttaggtcaccagattatgtctttggcatatggtctagaaatagaaaaaatgccttttgggcaccatggtgcaaaccatcctgttcacgacttaaaaaataatatagttttcattacttcacagaatcataactttgctgttgctgaaccaaacaatagagatgatatcaatattactcatagatctttatttgataactctattcagggcatagagcataaagagaaaccattctactcgattcaatgtcaccctgaagctagtcctggtccaaaagaattcgaaactttatttaaaagattttttaaggagatgaatgcctaa

SEQ ID NO: 319070 - DNA, 362 bp, Unknown
  Bacterial polypeptide expressing nucleotide sequence isolated from the Sargasso Sea
tttaaaagaagttcctttatttggaatttgtttaggacatcaacttctagctctttcttttggaggtaaaacttcaaagatgaaatttggccatcatggagcaaaccatcctgtccaagatcttaagtcaatgaaagtatccatcacttcgcagaatcatggttttactgttgtagaagactctctacctaaagagttgaaggtaactcataaatcattgtttgatggaacggttcaaggaatagaacatagtactttgcccgcatttagctttcaaggtcaccctgaagctagccctggacctcacgacttaaaggaattatttcaaaagtttgaagataatatgagagacaatgcctaaa

SEQ ID NO: 319071 - DNA, 892 bp, Unknown
  Bacterial polypeptide expressing nucleotide sequence isolated from the Sargasso Sea
aaaaatacatgcatctggtcttataagtaatgagttatttgaacaaagttcaaattggagagctcaaactagttttgcaaaatggatcatagatcaaaattcttgtgctttttttgatttagatacaaggtctttaacaaaaattataagaaattttggaccaaaaaacattatgctatgctctgaggattactttaaaaccaaaaatattgaagaaatttgtacacaaatagatcaaagtctctctctagaagaaaatgatgttattaaagattttacctcagaattaacaataaaagagcaagaaaaaaataaaaaaaaatacttaatagcttttttaaactttggtgcaaaggataatattaagaaaaatttatactcaagagattgtaatatagaagaatttgatatgaattttaaagccaacgaaataataaataaaaaatttgatggcatttttctaagtaatggcccaggtgatcccaaaaaagtttatgagaatataaaacctgaattaactaaattactaaataaaaaagtcccaacatttggcatatgtctaggtcatcaaatattaagcttagcttttaatgcttcaacagctcgaatggaaaaaggtcatcgaggaggaaatcatccagtaaaaaatttagatactaacaaagtagaaataacatctcaaaaccatggatttgttgttctagaaaataactttccgacttcactacaaattactcacaaatcattgttcgataaaaccatagatgggatgaaatcaaaagatcaacccttattctctgtacaatatcatccagaatcaagtccaggaccacatgacagtagatatctttttgacgaatttataaatctaatggataaaaatgccagctag

SEQ ID NO: 319072 - DNA, 943 bp, Unknown
  Bacterial polypeptide expressing nucleotide sequence isolated from the Sargasso Sea
atttctgacccatcttatgcaggacaaataattaacttcacatttcctcacattgccaatgttggaacaaacaacgaagatatagagtcagataaaatttggaccagaggtgtgatttttaattctgaagtaactaacccatctaattatagatctttaaaacacttagatgaatggcttaaaaagaataaaatagtaggtataactggactcgacacaagaagtttgactaattttattcgggacaaaggtgctcctaaggggacaatttcaaataataaatcaggaaaatttaatattaaaaaactaatcaaaaaaacaatttcatggcctggtttgaatggaatggatcttgctgaagaagtatctacaaaaaaaaattatacctgggtaggtctaaagacttggaataaagaaaaaggttataaaaaaaataataaaaaaaaatacagagttatcgcaatagattatggtataaagaaaaatattttaagatatttttctaattttgactgtgaagtaaaagttgttccttgcaatgaaaatcctgacaatttattaaaacttaaaccccatggaatatttttatctaatggtcccggggatccagctgctacgggtaaatatgcaattccaatagtacaaaaattaataaaatcaaatttacctgtatttggaatttgtttaggtcatcaaattcttgcgcttgcactaaatgcaaaaacaaaaaaaatgaaattaggacataggggtgcaaatcatcctgttaaaaatttaatttcaaaaaaagttgaaattacgagtcaaaatcatggttttgaagttataaaagaaagcttgccaaaaaatatcgagattacacataagtctctttttgataattctattgaaggaattaaattaaaaaataaaccagttttttctgtccaatatcacccagaat

SEQ ID NO: 319073 - DNA, 562 bp, Unknown
  Bacterial polypeptide expressing nucleotide sequence isolated from the Sargasso Sea
ttggggattaaaaaaaatatcctaagatacttttcaaattatgactgtgaagtaaaggtggtttcttgtaatttatcctcagaaaaaatacttgaattgaaaccacatggtgtttttttatctaatgggcctggtgaccccgccgctactggcaaatatgcaattccggttattagagaccttataaaaaaaaatattcctatttttggtatttgtttaggacatcagctgctaggattagcattaaatgcaaaaacaagaaagatgaaattaggccatagaggtgccaatcatcctgtaaaaaattatttaactggaaaagttgaaataacaagtcaaaatcatggatttgaagtagtagaaagtagcttgccgaaaaatgtaaaaataactcacaaatctttatttgataattctattgaaggtttaagattagtcaacaagtcagtcttttcagttcaatatcatcctgaagcaaatccaggaccacaagatagtaaatatttatttaatcagtttataaaagaagttaaaaaatatgccaaaaagaaaagacattaaa

SEQ ID NO: 319074 - DNA, 829 bp, Unknown
  Bacterial polypeptide expressing nucleotide sequence isolated from the Sargasso Sea
aatgaaagcaaagactcatttagctcaggcctagtcatccgtgaaagttcaccaatttctagcaactggagaaacaaactcagcttggaagattttttggttagaaataaaatcgtcggaatttccaatatagacaccagaaaactcacaaatcatttaagaaacaatggatcaatgaatgcctgtttggcggctaatggattaagtcataaagaagcactaagtgaagcaaaatcttttccaggtcttgcaggcttagatcttgcaaaagaagtttcaacaaaaactgcttatgaattttcctcaaacatgggtaactctgactctatttttcatgtggttgccatcgattttggtgtaaagacaaatattctcaatctgttatcaaaaaatgggtgcaaagtaaccgtaataccagcacaatcgtcatttgatgaagtaatgtcatatgatcctgatggagtatttttatcaaacggtcctggagacccagagccttgtgattatgcgattaactgcattagaaaattgcttgaattaaatatcccactatttggaatttgtcttggtcatcaactcttagctctcgcatcaggcgctaaaacagagaaaatgaaatttgggcatcacggtgccaatcatcctgtaattgatacagaaacaggagttgtatacatcactagtcaaaatcatggttttactgtcaatgagaaatccattccagaaaatgtcaacatcacgcataaatcactatttgatcaatccattcaaggcatagaactgagtgataagaatgcgtttagtttccagggtcatcctgaagcatccc

SEQ ID NO: 319075 - DNA, 718 bp, Unknown
  Bacterial polypeptide expressing nucleotide sequence isolated from the Sargasso Sea
atgcaaaaattaaaaaaggctatcctatttcttgaggatggccttttttttatcggaaaaagtcttggtagcagtggagaaacttttggtgaagtttgcttcaatacaggaatgactgggtatcaagaaatattaactgatccttcatattctaaccagatgattgtaatgagcagtccgcatatcggaaattatgggactaataatagtgataccgaatctgaaaaagtttatgcgacaggttttataattaagagcgaatctatacaaccttcaaactggagatctgaagaatctctatcatcttttttgataaagcataatatagttggcattcaagacattgacacaagagcattaactattcacataagaaaaaaaggcgcaatgagaggaattatttcaacgaaagactttgatccagataatttggcgcgcaaaattaagaatgttcctaaaatggcaggtcaagacttagcaataaaagttgcgagaaataaaaaaatggttttatcaaatactgataatcctatttataaaattgcagcaattgattttggtatgaaaagcaatatatatgatattatgttagaacacgaagctgaagttgaaatttttccagcaaatgtatcgcacgatgaaatacttgcttctaacccagatggtatatttttatcaaatggaccaggagaccctgctgctgtaacatacgcaatag

SEQ ID NO: 319076 - DNA, 571 bp, Unknown
  Bacterial polypeptide expressing nucleotide sequence isolated from the Sargasso Sea
caccatgtggtcgccctcgactttggcgtgaagcgcaacattctgcgctgcctggcaagctccgactgcaaagtaactgtggtgcctgcctctacatctgcagaagacgtgctcgccctgaacccggacggggtattcctgtcgaatgggcccggcgacccggcagcgaccggcacctacgccgtgccggaaatcaaaaagctcgtggacagtggcaagcccctctttggcatttgcctcggccaccagatgcttgccatcgcgcttggcgcaaaaaccgaaaaaatgctccagggccatcacggcgccaaccacccggtgaaagatcacaccaccgacaaggtggaaatcacctccatgaaccatggcttcaccgtggatcgcgacagcctgcccgacaatgtggaagagacccatgtctccctctttgacggcaccaattgcggcatccgcctgaaagacaagcctgtcttctctgtccagtaccacccggaagcaagtcccggcccgcaggacagccactatctcttcgaccgctttgtaaagctcatcgccgaggcgaaacgctaat

SEQ ID NO: 319077 - DNA, 712 bp, Unknown
  Bacterial polypeptide expressing nucleotide sequence isolated from the Sargasso Sea
acaattaaatggagtggattaaaaaacctagatcttgctgagaaagtaactaccacaaaaaattatatttggaagggacttaaaacttggaaaaaacaaataggttacgaaaaaaataataaaaattcctttcatgtagttgctattgattatggaataaagaaaaatattttgagatatttttccgactttaaatgtaaagttactgttgtttcatgcaaaacatcagctgaaaaaattatagcgcttaaacctaacggaatatttttatctaatggacctggagatccagctgcaactggaaaatatgcaattaaaataattaaagatctaattaaaaaaaacctacctttattcggtatttgtcttggtcatcaaatacttgcactgacattgggtggtaaaacaaaaaaaatgaaattaggtcatagaggtgcaaatcatcctgttaaaaatttagttaatgacaatgtagaaatcacaagtcaaaatcatggttttgaagtagtgatagataatctaccaaaaaatattgaagtcacacataaatctctattcgataacagtatagagggtataaaactaaaaaataaacctgtgttttctgttcaatatcatccagaatcaaaccctggaccgcaggatagtgtttatttatttcaagaatttattaacaacatgaaaaaaaatgccaaaaagaaaagatcttaaa

SEQ ID NO: 319078 - DNA, 466 bp, Unknown
  Bacterial polypeptide expressing nucleotide sequence isolated from the Sargasso Sea
attaaaccctgatggtatttttttatcaaatggcccaggagaccccgctgctactggaaagtatgccattccagttattaaaacatttatcaaaaacaatgtccctgtctttggaatttgtttgggccaccaattactaggtttagctttaggtgcaaaaacaaaaaaaatgagtttaggtcatagaggggctaaccatcctgtaaagaatttaataaaaggaaatgttgaaataacaagtcaaaatcatggttttgaaatagtaaaaaacaatttaccaaaaaatattcaaattacgcatcaatctctttttgataacagtatagagggtattaaacttaaatctaaaccagttttttcagttcagtatcatcctgagtccaatcctggtcctcaggacagtgtttacttatttgaagaatttataaaaaatatgaaaaaaaatgccaaaaagaaaagatattaa

SEQ ID NO: 319079 - DNA, 814 bp, Unknown
  Bacterial polypeptide expressing nucleotide sequence isolated from the Sargasso Sea
actgtcaattcttctcaataaggagaagaccatagtgtcttttccatgcatcttagcacttgaagacggaagcacgtttatcggtcaaggtattggagctaaaaaagtagcaattggcgaaattgttttcaatacctcgatgagtggctatcaagaaataataactgatccatcttattgcaaacagattattacatttacccatcctcatataggtaatacaggtattaattctgaggataatgaatcagataatatatatgctgaaggagtcgttatcagaaattatatctctaagccaagcaactatagatctgaagaagatcttgatgattttttgacaagaaataattctattgggatttttggaatagatactagacagataacaattattttgagggaaaaaggctcattaaaagcatgcattagtccgatagataaaaataatgaagaatcagcaatatctttagcaaaaagcttcgatggtcttgagggaatggatttagccaaagaagtaactacgaaaaatttatattcttggaatgagggagtctggcctgattataaagagtcaaaaagtatgctgcatatcgttgcatatgactatggaattaaaaagaacattttaagactactttctgagcatgttgggaaagtaacagttgtaaatgcaagatgctcttttgatgaagttctaaagatgaatcctgatggtatctttttatcaaatggacctggcgatccagagccatgcgattatgctattgaaaatattaaaagggcactaaatgaaaatatcctatatttggga

SEQ ID NO: 319080 - DNA, 490 bp, Unknown
  Bacterial polypeptide expressing nucleotide sequence isolated from the Sargasso Sea
aatgaatgcgaataaaattttaagtttaaaacctgatggtatatttttatcaaatggtcctggtgatccagctgcaacaggaaaatattcaatagacgttataaaagaattaattaaaaaagatctaccaatatttggtatttgtttagggcaccaaatattaggacttgctttaggagcaaaaacaaaaaaaatgaaattaggacatagaggtgctaatcacccagtcaaaaacctagataatggatcggtagaaattacaagtcaaaaccatggttttgaaatattgaaaaattcaataccaagaaatacagaggttactcatgtttcgcttttcgataatagtattgaaggaattcgtttaaaaaataaacctgttttttctgtacaatatcatccagagtcaaatccaggtcctcaagacagtgtttatttgtttaaagaatttgtaaataaaatgaaaaaatatgccaaaaagaacagatattaa

SEQ ID NO: 319081 - DNA, 907 bp, Unknown
  Bacterial polypeptide expressing nucleotide sequence isolated from the Sargasso Sea
taatgtcaaaggtataatcgttagaaatttttcatctaatagcagcaattggagatcaaaaaagaattttaatcaatggttagttgagaaaaatataataggtctatatggaattgatacaagggctcttgttaagatcttaagatctactggcgcgatgaatggtgttattacctctctagataaaactaatgaaagttgtttaaaaataattcaggatactccaaagatggagggattaaatttatcaaaatttgtttcaacaaagcaacaatatttatggaaaagtcatacgcaaacaacttttgatttaagaaaaagatatgatgaaactcttaaaaatttaaaaatagtagcaattgattttggaattaaaaattcaattctaaatagactcgtatcccatggttgtgaagttttggttttaccttctcgatcaactataaatgatgttctgtctaacaagccggatggtatatttttctcaaatggcccaggcgatccctcttcagtttctgaagggataaacctagcaaaatctctcattgaatatggtgaaatacctatgtttggtatttgccttggtcaccaaatatttggattagcattaggaggttcaacttataaattaccttttggacatcgtggtttaaatcatccttgtggcgaaaatcataaaattgagataactagtcagaatcatggttttgctattgatcccaattctctctcaaaggacattgttagaatcacccactataacttaaacgataatactgtggctggtctagaggtttataataagcctatatttagtgtgcaatatcatccagaagcaggacctggcccacatgattcagattatttatttaaaaaatttgtttctctaatgttagaaagatgttga

SEQ ID NO: 319082 - DNA, 724 bp, Unknown
  Bacterial polypeptide expressing nucleotide sequence isolated from the Sargasso Sea
aaatttgaagattatttagaagatgccaaaatgtttaaaggaataaatgagcaagaccttgccaaagttgtaacctgtaaagaaaaaatcttatgggatgaaaaagaaattaatatttataacaaaaaaattaaaagaaaaaaaattaatgctcatgttgttgttgtggattatggagtgaaaaaaaacatattaagatgtttatcttcaagatttgaaaaaatatcattggttccttgtacttcaacatatagtgatatagtaaatttaaaacctgatggtgttttcttatcaaatggtcctggtgacccaagtgctaccggagaatatgcaattcctgtaatcaaaaaactaattgactcaaatataccaatatttggtatttgtcttggtcatcaattactagcattatcattagggttgaagacttataagatgcaccaaggccaccatggagcaaatcatccagtaaaaaataattatgactcaagtgtcagtataacatccatgaatcacggttttgcagtgagaagtgataatttacctgaagacattattgaaactcatactagtttatttgatggcagtaattgtggaattgaaatagttaataaaccaattttttcagttcaacatcatcctgaagcatcgcctgggccaaatgatagctattatttatttgataaatttttagaaaatattgagaaacacacaaatgcctaaa

SEQ ID NO: 319083 - DNA, 294 bp, Unknown
  Bacterial polypeptide expressing nucleotide sequence isolated from the Sargasso Sea
aaatgtttcaaggtcacagaggatcaaatcatcctgttaaaaatttaataaataataaagttgaaataacttctcaaaatcatggttttgaagttgatagagaaactttttctaaagatattattgaaacacatatttctttatttgatggaacaaatgaaggattgaggcataaaagtcttcctgtttttagtgttcaataccatcctgaagcttctcccggtcctcatgatagtcactatcttttttctcaattttatgaccacataaataaatatgccaaaaagaactgat

SEQ ID NO: 319084 - DNA, 863 bp, Unknown
  Bacterial polypeptide expressing nucleotide sequence isolated from the Sargasso Sea
agatttatggttaaaaaaaaataaaatagtaggattaactggtttagatactagaagtttaactaactttattagagataaaggtgcaccaaaaggtaccatttcaaacaataaaacaggcaattttaatttaaaaaaattaattaatatttccattaaatggcctggactcaatggccttgatcttgcaaaaaatgtaacaactcaaaaaaaatatatctggagtggttttaaaacttggaataaaaaaaaaggttttgaaaaaaataaaaataaaaattttaaaattgtagctatagattatggaattaaaaaaaatattttaagatatttttctaattttagatgtgatgttcttgtagttccatgtcaaacgagtgctaaacaaatactaaaactaaaacctgatggtatttttttatctaatggtccaggggaccctgctgcaacaggaaaatatgcaataaaaattattcaaaatttaattaaatctaatattccaatatttgggatatgtctcgggcatcaattattggctttagcattaaatgcaaaaacaaaaaaaatgaaaataggacatagaggtgcaaatcaccctgttaaaaatttaataaatgatagagttgagataaccagtcaaaatcatggatttgaagtagttaaagaaagcttaccgaaaaatgttgagatgactcataaatctttatttgataattctgtagaaggaataaaattaaaaaataaacctgttttttctgttcaatatcacccagaatcaaatcctggcccccaagatagtcattatttatttaatcaatttattaacttagtaaaaaaaaatgccaaaaagaaaagatattaaa

SEQ ID NO: 319085 - DNA, 796 bp, Unknown
  Bacterial polypeptide expressing nucleotide sequence isolated from the Sargasso Sea
atgaccggttaccaagaaataatcacagacccttcataccataaacaaatcgttaccttaacctatcctcacataggaaacactggcaccaatgaagaagacaacgaaagcaaagactcatttagttcaggcctggtcatccgtgaaagttcgccaatctctagcaactggagaaacaaactcagcttagaagattttttggttaaaaataaaatcgtcggaatttccaatatagacaccagaaaactcacaaatcatctaagaaacaatggatcaatgaatgcctgtttggcggcaaatggattaagtcataaagaagcactaagtgaagcaaaatcttttccaggtcttgcgggcttagatcttgcaaaagaagtttcaacaaaaactgcttatgaattcccccctaatatgggtaactctgactctatttttcatgtcgttgcgatcgattttggtgtaaagacaaatattctcaatctgctatcgaaaaatggctgcaaagtaaccgtaataccagcacaatcgtcatttgatgaagtaatgtcatatgatcctgatggagtttttttatcaaacggtccaggagatccagagccttgtgattatgcaattaagtgcattagaaaattgcttgaattaaatatcccactatttggaatttgtcttggtcatcaactcttagctctcgcatcaggtgctaaaacagagaaaatgaaatttggacatcacggtgctaatcatcctgtaattgatacagaaacaggagttgtatacatcactagtcaaaatcatg

SEQ ID NO: 319086 - DNA, 964 bp, Unknown
  Bacterial polypeptide expressing nucleotide sequence isolated from the Sargasso Sea
tcttatgctggtcaaataattaattttacatttcctcatataggtaacgttggcaccaacaaagaagatcatgagtctgataaaatttggacaagaggagtaattttaaattccgaaataacaagcccttcaaactatagatcactaataaatttagatatatggcttaaaaaacacaatattgttggcttaacaggattagatacaagaagtttaacaaattttattagagacaaaggtgctcctaagggcacaatttcattttctaaatatggaaaatttaatataaataaattaatcaacctttcaaataagtggacaggattaaataatcttgatcttgcagaacaagttaccaccaaaaaaaattatgtatggcatggttttaaaacttggaaaaaagaggaaggttatagaaaaagtaagaagacattttttaatgtagtcgctatagattacggtataaaaaaaaatattctaagatatttttctgactttaattgtaaagttaatatagtttcgtgcaaaacaagtgttaaaaaaatattaaaattaaaaccaaatggcatattcttatctaatggtccaggcgatccagcagcaactggaaaatatgcagtaccaattataaaagatttaataaaaaaaaatcttccaatttttggaatttgtcttggtcaccaaatactaggtttggccttgggtgcaaagacaaaaaaaatgaagttaggccacagaggtgcaaatcatccagtaaaaaatcttattgaaaataaagttgaaattactagtcaaaatcatggttttgagattgttaaagaaaatttaccaaaaaatattcagataacccatacatctttatttgataattctattgaaggtataaaacttaaaaataaaccagtgttctctgttcagtatcatccagagtcaaatcctggggcacaagatagcgtttacctat

SEQ ID NO: 319087 - DNA, 922 bp, Unknown
  Bacterial polypeptide expressing nucleotide sequence isolated from the Sargasso Sea
acatataggaaattatgggactaataatagcgataccgaatctaaaaaagtttatgcgacaggctttataattaagagtgaatctatacaaccttcaaattggaggtctgaagagtctctatcatcttttttaataaagcataatatagttggcattcaagatatcgacacaagagcattaactattcacataagaaaaaaaggtgcaatgagaggaattatttcaacggaagattttgatgctcataatttggctagcaaaattaagaatatacctaaaatggaaggtcaagacttagcaattaaagttgccagaaagaaaaaagtggttttatcaaatactgataatcctatttataaaattgcggcaattgattttggcatgaagagcaatatatatgacattatgcttgaacacgatgccgaagttgaaatctttccagcaaatgtatcccacgatgaaatacttgcttctaatccagatggtgtgtttttatcgaatggacctggagaccctgctgctgtaacatatggaattgaaacggtaaaaaatttgttgagtaaaaaacctatatttggaatatgtcttgggcatcaaattctagctttagcattaggtgctaatacgttcaaaatgaagtttggtcatagaggtattaatcagccagttaaaaacttaattacaaacaaggttgaaattacatcccaaaatcatggatttgctgttgacgaagattctcttccatcaaatgtgactgttacgcataaacatttaaatgatgatactgttgcagggataagctgcaatgatatttcagcatattcagttcaatatcatcctgaagccagtccaggaccacatgattcaagatatgttttcaaagaattttttaatatgatgaaaaacgatgccaaaacgtaa

SEQ ID NO: 319088 - DNA, 703 bp, Unknown
  Bacterial polypeptide expressing nucleotide sequence isolated from the Sargasso Sea
aatgaattctaatcaaaatacggcaattatagttcttgcagatggaactgtttttcatggaaaaccttgtggtgttgttggtaccacaacaggtgaaatagcgtttaatactggaatgactggttatcaggaaattttcagtgatccttcatactatgggcaaataataactatggcaaatgctcatattggaaattatggaacgaacgctgaagaaattgaatctgatcaatgtaaaatcagaggtttagttgttaagaaatttgcacatcatttttctagatattctgaaacagaatcgttacaagattatcttgttaaaggaaatgtggtagggataaaagatgttgatactagagcattaataagttatattcgagagaatggagcacaaaatgctattatttcgtcagaggaaaccgatgttgaaaaattgaaagttattttaaataaggttccttcaatgaaaggtatggaattagcatctaaagtttcaactgacaaaccttacgaaattggagatggtgaacataaagttgcattaatagattacggggttaaaaaaaatattgtaagatgtttagtaaatagaaactgtaaaattaaagttttcccgtatgatgtttcatgtgatgaaattatgaactggaatccagatggtataatgttgtcaaatggtcctggtgatcctgaacctttaaag

SEQ ID NO: 319089 - DNA, 280 bp, Unknown
  Bacterial polypeptide expressing nucleotide sequence isolated from the Sargasso Sea
aatggctaccggccatcatggtgctaaccaccctgtaaaaactctggccgatgacacggtgatgattaccagtcagaaccatggttttgcggtggatatagataccttgccagccaacctaaaggtgacccatgtgtcgctgttcgacggcaccttgcaaggtattgagcgcactgatgtgcccgccttcagtttccaggggcacccggaagcgagcccggggccgcgcgactgtgcgccattgttcgatcatttcatcgagctgatggaagcgaaataa

SEQ ID NO: 319090 - DNA, 862 bp, Unknown
  Bacterial polypeptide expressing nucleotide sequence isolated from the Sargasso Sea
gatggttggttgaaaaagaataaaatagtaggaattacaggaattgatacaagaaatttgaccagttacatcagggacaagggtgcccctaaaggaactatttgtaatgataagagaggtaatttcaatattaaaaaattaattaataaatctgttaagtggcctggacttaacggtttagatcttgctcaagatgtcagtaccaaaaaaatttataaatggaaaggatataaaacttggattaaaggaaaaggttttcaaaaatcctttaaaaaactttacagaatagttgcaatagattatggaattaaaaaaaatatactgaggtacttttcaaactataattgtgaaattaaagttgttccttgtaaatattctgctgagcaaataattaatctaaagcctgatgggatttttttatcaaatggacctggagatccagcagctactggaaaatatgcaatacaaacaatacaaaagctaattaaaaaaaatttacctatttttggaatttgcttaggtcaccaaatattagctttagcattaaatggaaaaacaaaaaaaatgaagttgggtcatagaggagcaaaccatcctgtaaaaaatttaattaataataaagtagaaattacgagccaaaaccatgggtttgaagtaattaaacaaagtttaccaaagaatgtcaaagttacgcatatatctctttttgataaaactgttgaaggtttaagattaaaaaataaaccagttttctctgttcagtatcatccagagtcaaatcctggtcctcaagatagtcattatttatttggagaatttattgaagatgtaaaaaaatatgccaaaaagaaaagatattaaa

SEQ ID NO: 319091 - DNA, 568 bp, Unknown
  Bacterial polypeptide expressing nucleotide sequence isolated from the Sargasso Sea
gatgattaattcatataaaaaaaacgcgaaattagttctaagtaatggaattgtattcccaggattcttttttggtgcttctgggacggccattggagaaatagtttttaatacgggaatgactgggtatcaagaagttattacagatccaagttattatgggcagatattaacattcacttatccagagattggaaatactggtattaattttgaagattcagaatctgatattaatgtaaaggggataattgttagaaatttttcatctaataacagcaattggagatctaaaaagaattttaatcaatggttaattgagaaaaaaataattggtctttatggtattgatacgagggcccttgttaaaatcttaagatctagtggagcgatgaatggagttattacctctctagataaaacagatgaaagttgtttaaagataatccatgatatgccaaagatggagggattaaatttatcaaaagtagtttcaacaaggcaacaattttcgtggaaaagtcatacatcaacgatatttgatttaaggaaaagatatactgaagcg

SEQ ID NO: 319092 - DNA, 613 bp, Unknown
  Bacterial polypeptide expressing nucleotide sequence isolated from the Sargasso Sea
agagtatcgactaataagccttactattttggtgatgaaaattctaaatataagatagctgtacttgatttaggagtaaaaatgaatattcttaaaaatctttcaaaaagaaatgcttatatgaaagtttttccacacaattctaaatatgaagatatgaagaaatggaatcctgatgcatatttcatctcaaatgggccaggtgatccagaaccattatctaatgcaattaatgttactaagaaaatactaaattctaagaagcctctttttggtatatgtttaggtcatcaagttatagctctagcaaatggaataaagacatataagatgcataatggacataggggtataaatcacccagttatcaatttaaagactggtaaaggtgaaattacttctcaaaatcatggttttgcaattgataaagaggacacagaaaaaaataaaaatattgaaattactcacatgcatcttaatgatgacaccattgctggaattaggattaatgataagcaatgtttttctgttcaatttcaccctgaagcaagtgcaggacctcacgattcttcatacttatttgatgaatttattgacatgataaaaaagtaat

SEQ ID NO: 319093 - DNA, 829 bp, Unknown
  Bacterial polypeptide expressing nucleotide sequence isolated from the Sargasso Sea
caagaaattatttctgatccatcctatgcaggtcaaataattaatttcacattcccacatattgggaatgttgggaccaataaagaagatgttgagtctgataaaatttgggcaagaggtgtaatatttaattctgaaataacttctccttcgaattatagagcatttttgcatttagatgcatggttaaaaaaaaataagattgttggaattactggactagatacaagaagtctaacgaattttattagagataaaggggcacctaaagggacaatttcatattcaaaaaataagaaatttaatataaataaattaataaactcgacaattaaatggggtggattaaagaatcttgatcttgcggaaaccgtaacgacttcaaaaaactatatttggaaagggcttaaaacttggaaaaaagaaacaggatatgaaagaaataaaaaaaattcttttcatattgttgcgattgattatggaataaaaaaaaatattttaagatatttttcagatttcaaatgtaaagtaacaatcgtttcttgcaaaacttctgctgaaaaaatattagatcttaaaccacatggagtttttttatctaatggtcctggtgatccagcagcaacaggaaagtatgcaataaaaatacttaataaattgattaaagaaaatctacctatatttgggatttgtctaggtcatcaaattttagcattagctttgggtgcaaaaacaaaaaaaatgaaattggggcacagaggtgcaaaccatcctgtcaaaaatttagttcatgataaagttgaaatcactagtcaaaatcatggtttgt

SEQ ID NO: 319094 - DNA, 697 bp, Unknown
  Bacterial polypeptide expressing nucleotide sequence isolated from the Sargasso Sea
agagataaaggcgcaatgaatggtatcatctcatctaatgatttagatatacaaaatttagaaaaaaaattgaaagaattcccagatatgaatgggctggatttagcgaaagatgttacaactcaaaaaaaatataaatggccaggaaaagggcaatataaagtagctgttattgattttggtattaaaaaaaatattttacgccttctatcagatgcaggatgtgagcttacagtcttcccagctagtattaaagccgaggatattctttcatttgaaccagatggtgtttttttgagcaatgggcccggtgatcctcttgcagttacttatggaattgaaactgttaaaaaattattaggaaaggtgccattgtttggtatttgtttgggacaccaaatattagctcttgcgcttggagcatcaacttttaaattgaaatttggacacagaggtataaatcatccagtaagaaacaatgaaaaaaatacagttgagataacgagccagaatcatggatttgcggttgatctcgattcgttgcctcctaacgtgatttctactcatattaacttaaatgacaatacctctggaggaattcgttgtaccgatattcctgctttttcagttcagtatcatccggagtcaagccctggtccgcatgacagcagatacttatttaatcaatttattgaga

SEQ ID NO: 319095 - DNA, 382 bp, Unknown
  Bacterial polypeptide expressing nucleotide sequence isolated from the Sargasso Sea
actgatacttgaagatggcactaagttcactggtaagtctattggcattgagtctcattctgttggcgaagtcgttttcaatacagcaatgactggatatcaggaaatcatcactgatccttcatatcataaacaaattgttaccctaacctatcctcacatcgggaatacaggaacaaatgacgaagacaatgaaagcaaggattctttctgttcaggtttggttattcgagaaagctccccaatttcaagtaattggagaaatcagcttagccttgaagaatttttatcaaagaatgagattgtaggaatatctaatatcgataccagaaaattgaccaatcatttaagaaatcatggctcaatgaatgcttgtttggtc

SEQ ID NO: 319096 - DNA, 551 bp, Unknown
  Bacterial polypeptide expressing nucleotide sequence isolated from the Sargasso Sea
gatgactaattcatataagaaaaacgcaaaattggttttaagtaacggaattgtattcccaggattcttttttggtgcttctggtacagccattggtgaaattgtttttaatacgggaatgactggatatcaggaagttattactgatccaagttattatggacaaatattaacattcacttatccagagattgggaatactggtattaattttgaagattcagaatctaatattaatgttaaagctataattgttagaaatttttcatctaatagcagcaattggagatctaaaaagaattttagtcaatggttagttgagaaaaatatcataggtctatatggaattgatacaagagctcttgttaaaattctaagatctagtggcgctatgaatggagttattacctctctagaaaaaactcatgaaagttgtttaaagataatttgtgataccccaaagatggaaggattaaatttatcaaaagttgtttccacgaagcaacaatatttatggaaaagtcatacgcaaacaatttttgatttaagaa

SEQ ID NO: 319097 - DNA, 641 bp, Unknown
  Bacterial polypeptide expressing nucleotide sequence isolated from the Sargasso Sea
gaagctgggtgaaggctatggcacacaggctgcgccgcgcttccatgtggtggcgtacgactttggcgtcaagaaaaacatcctgcgcatgctggccgagcgtggctgcaagctgaccgtggtgcctgccaagacgcctgcggccgacgtgctggccatgaagccggacggcgtgttcctgtccaacggccctggcgacccagagccctgcgactacgccatcgaagccacccgccagatcgttgaagcgggcgtgcccaccttcggcatctgcctgggccaccagatcatggccctggccagcggcgccaagacattcaagatggacaacagccaccacggtgccaaccacccggtgaaggacctggacaacggccgcgtgagcatcaccagccagaaccacggctttgccgtggacatggcctcgttgcccgccacgctgcgccctacgcacatcagcctgttcgacggcacgctgcaagggctggagcgcaccgacaagcctgcgttctgcttccagggccaccccgaggcatcgcccggcccgcacgacatcgcctacctgtttgaccgcttcaccgcgctgatggagaagaataatgccaaagcgcacagaccctcaatcgatcctcatcatcggc

SEQ ID NO: 319098 - DNA, 670 bp, Unknown
  Bacterial polypeptide expressing nucleotide sequence isolated from the Sargasso Sea
aagttactacgcaaaaaaattacattttggaaaggatttaaaactttggagaaaagaacatggctatagaaaaaataatcaaaattcatttcatgtagttgccatagactatggaataaaaaaaaatattttgagatatttttctgattttaaatgcaaagttactgtagtttcttgtaaaacatctgcagaaaaaattttatctattaaaccaaatggtgtcttcttgtctaatggacctggagatccagctgcaacaggaaaatatgcaattcaaataattcaaaatcttattaaaaagaaaatgccattatttggtatctgcctaggtcatcagatactcgcacttgcattaggtggtaaaacaaaaaaaatgaagttaggtcacagaggagcaaatcatcctgtaaaaaatttgattaatgacagtgtagaaattactagccaaaatcatggctttgaagttgtaagagaaaatttaccaaaaaatattcagattactcataaatctttgttcgataatagtatcgagggaataagattaaagaataatccagtattttcagttcaatatcacccagagtcaaacccaggaccacaagatagtatctatttattccaggaatttattaacaacatgaaaaaaaatgccaaaaagaaaagatcttaa

SEQ ID NO: 319099 - DNA, 790 bp, Unknown
  Bacterial polypeptide expressing nucleotide sequence isolated from the Sargasso Sea
gatactagaagtttaacaaattttattagagacaaaggggcgcctaagggaacaatttcttattcaaaaaatagtaaatttaattttagcaaattaacaaactcaactactaaatggagtggattaaaaaatcttgatcttgcagaaactgtaacgacctcaaaaaactatatttggaaaggcttaaaaacttggaagaaagaaaccggatataaaaaaaatacaaaaaattcttttcatgtggttgcaattgattatggaataaaaaaaaatattttaagatatttttcagacttcaaatgtaaagtaacagttgtttcttgcaaaacttctgcagaaaaaatattagatcttaaaccacatggaatatttttatccaacggtcctggtgatcctgcagcaacaggaaaatacgcaatagaaatacttaataaattaattaaaaaaaatttaccaatatttggaatttgtttaggtcaccaaattttagctttagccttgggtggaaaaacaaaaaagatgaaattagggcacagaggcgcaaaccatcctgtcaaaaatttaatccatgataaagttgaaatcaccagtcaaaatcatggttttgttgtggttgaagaaactttgccaaaaaaaattgaagtaactcataaatctctttttgataataccattgaaggaataagacttaaaaatagaccaattttttcagtgcaatatcatccagagtcaaaccctggaccacaggatagtgtctacttgtttcaagaatttattaacaatatgaaaa

SEQ ID NO: 319100 - DNA, 823 bp, Unknown
  Bacterial polypeptide expressing nucleotide sequence isolated from the Sargasso Sea
gaaatttcaaatccatcaaactatagagctttaaagcatttagatgattggttaaaaaagaataaaatagtaggcctcactggccttgacaccagacgtttaacaaactttataagagataagggtgcacctaagggtactatttcttattctaaatacggaaaatttaatatcaataaattaaaaaatcaatcaaataaatggaatggcttaaataatttagatttagctaaagaagttacgaccaaaaaaaattataaatggcccggatttaaaacctggaaaaaagaaagtcgatttttaagaaataaaactaagtcattcaaaattgtggcgattgattatggaataaaaaaaaatattttaagatacttttctgattttaaatgtgaagttaacatagtttcttgcaagacaagtgcggaaaaaatattagggatggatcccgatggggtttttttgtctaacggacctggcgacccagccgctacaggaaaatatgctattggaattattaaaactttaattaaaaaagaaatgcctatttttggtatttgtcttggtcatcaaatacttgctttagctcttggtgcaaaaacaaaaaaaatgaaacttggacatagaggagctaatcatcccgttaaaaatctaattaatagtaatgttgaaattacatctcaaaatcatggttttgaaattgttaaagaaagtctacccaaaaatgttgagataactcataaatcattatttgataactgtattgaaggaattaaattaaaaaacaaaccagttttttcagttcaatatcacccggagtcaaatc

SEQ ID NO: 319101 - DNA, 478 bp, Unknown
  Bacterial polypeptide expressing nucleotide sequence isolated from the Sargasso Sea
aaaatattaaagataaagcccgatggtgtatttttatcgaatggacctggtgatccagctgctacaggaaaatatgctattggaattattaaaactttaatcaaaaaaggagttcctatttttggtatttgccttggtcatcaaatacttgctttggccctcggtgcaaaaacaaaaaaaatgaaacttggacatcgaggagctaatcatcctgttaaaaatctaattaatagtaatgtagaaattacatctcaaaatcatggtttcgaagtagttaaagaaggtctacccaaggacattgagataactcacaaatcattatttgataattgcattgaaggaattagattaaaaaacaaacctgttttttcagttcaatatcaccccgagtcaaatcctggtcctcaagatagtgtttatttatttaaagaatttattaacaatattaaaaaaaatgccaaaaagaaaagatattaaa

SEQ ID NO: 319102 - DNA, 624 bp, Unknown
  Bacterial polypeptide expressing nucleotide sequence isolated from the Sargasso Sea
ggacaaaggaagatggatttaaaaaaacgaaaaagaaggaatttagagtagttgcaattgattatggaataaaaacaaatattttaagatatttttcaaattttaattgcgatgtagtggttgtgccatgcgatgcttcagctgaatatatcatgacacataaaccaagtggaatttttttgtcaaacggccctggtgatcctgcggctacaggtgtgtatgcaatcaaaattataaaaaatcttataaaaaaaggtttaccaatttttggaatttgtcttggacatcaattattagcgcttgctttgggtggtaagaccaaaaaaatgaaacttggacataggggcgcgaaccatcctgttaaaaatcttaaaaataataaagttgaaataactagtcaaaatcatggatttgaggtgaccaaaaataatttgccatctcaaattgaaattacacaccaatctttatttgataatagtattgagggtatcaagttaaaaagtaaaccagttttttcagtacagtaccaccctgagtcaaaccctggacctcaagacagccactatttatttaataactttattatggaagtaaaaaaatatgccaaaaagaaaagacattaaa

SEQ ID NO: 319103 - DNA, 825 bp, Unknown
  Bacterial polypeptide expressing nucleotide sequence isolated from the Sargasso Sea
aggcagatttttaggggaattggaattggttatgaaggtacagctactggtgaagtttgctttaatacatctataactggttatcaagaaattatatctgatccttcttactcgggacaaattattaatttcactttcccacatattgggaatgttggaacaaataaagaagaccatgagtcagataaggtttggacaaaaggtgttatttttaattcagaaataacgaatccctcaaattacagatcgcttaaaaatttagatcaatggttaaaaaaaaataaaatagtaggattaactggattagatactagaagtttaactaattttattagagacaagggtgcaccgaaagggaccatctcaaacgataaaaaagccaattttaatttaaaaaaattaattaatatttcaatgaaatggccaggactcaatggtctcgatcttgcaaaaactgtaactacacataaaaaatatatttggactggttttaaaacttggaataaagaaaaaggttttgaaaaaaataagaataaaaaatttaagattgtagcaatagattatggaattaaaaaaaatattttaagatacttttccaattttaaatgtgatgttcttgtagttccatgtcaaacaagttctgaagaaataatgaaattaaaacctgatggtgtttttttatctaacggtccaggagatccagctgcaacaggaaaatatgcaataaaaattattcaaaatttaataaaatctaatatcccaatatttgggatatgtcttggtcatcaattattagctttagcattaaaagcaaaaacaaaaaaa

SEQ ID NO: 319104 - DNA, 580 bp, Unknown
  Bacterial polypeptide expressing nucleotide sequence isolated from the Sargasso Sea
aatgaataaaattagtttaatattgcaagatggaacaacttatgaaggtttttcatttggaagtcagaaagatgttattggagaggtcgtttttaacacttcaatgactggctaccaagaaatgcttacagatccttcatacagaggtcaaatcttgatacctacttatcctatgatagggaattatggtataagtgagattgatatagaatctgatgaaattcaggtatctggatttgttgtaaggcaatattgcgaaatgccatctcataataattctttgatgaacatacatgaatatcttcttaggaacaatattcctggaatctatggattagatacaagatctatagttaagaaaataagaaattatggtgtgatgatgggatctatttcatctgaaaataatacaaacaaagtaattgataaattaaattctattaaggcttacgaggaacataattttgtttctgaagtttcaagcaataaaattcattcaactaataaaaaaaataaatataaagtagcgttattagacctaggggtgaaaaaaaatattatcagattactagaatcaaga

SEQ ID NO: 319105 - DNA, 865 bp, Unknown
  Bacterial polypeptide expressing nucleotide sequence isolated from the Sargasso Sea
cacatagggaatgtaggtattaacgatgatgatgaggaatcaaatcgtgtttatgttagtggtctaataataagagatttatctattacagcaagtaattggaggagtgaaaataatttagccgaatatttgaaaaaacataagatcgttgcaatttcaggtattgatacgcgtcaactaacaagacatatacgcaaaaatggggcaatgaaaggttacattattgtaggctcagatatcaaaattgaaaacgcggtaaataaagcaaaatcatttggtggtttggtgggaatggatttagcaaaagaggtcacgactcagacatcatatatttggtctcagggggtttggcatttgaagaggaaatcaactaccaaaaataaaaataagcatcgtattgtcgcatatgattatggtattaaaagaaacatacttaaaatattagttgatttggggtgtgaggttactgtagtaccagcaaaatatacagctgaggaagttttaaaagaaaaacccgatggtattttcttatcaaatgggcccggtgatccagatgcatgtgattatgctatttcggcaataaaaaaaatcataactacaggaatacccgtttttggtatttgtttaggccaccaacttttatcgttagcgcttggagccaaaacggtgaaaatgaaatttggccatcacggagcaaatcacccagtgttatctcttgctgacaagagagttttaattacaagtcaaaatcatggttttgctgttgatgaagaatctttaccaaaagatttgcaagcaacccatcgctctctatttgatggctctttgcagggagtacatcacaaaagatttcctatatttgatt

SEQ ID NO: 319106 - DNA, 844 bp, Unknown
  Bacterial polypeptide expressing nucleotide sequence isolated from the Sargasso Sea
actgcttttagccgatggaactcgcttcgaaggatctctttttggctcagaagagatagcagaaggagaacttgttttcaccacaggaatgtgtggatatcaggagagtctcaccgatccctcctttgcagggcaggttctcacattcacatatcctcttttaggaaactacggcatccacccaggagtttcagaatcatcctcagtacatcctaggggcgtagtgtgcaggcaacacatgacgtcccctgatcatagaaattccataggcagcgtacacgatctcttggtcgctcacaacatccctggaatagagggaatcgatactagggccctcacaagaagggtaagggagcatggaacagtgctatgtgtattcggtccggccgagagggtcgaagagatggaggtcatactgaaggaaatgactcccccagattccgacgacctagttgcaaaggtaacatgtgataagcctagaatactgaaccaaggggctttggatggagatgggcgacctcttccgcgtctggctgcgatagattgtggggtcaagtacaacatcctcagggagctttgttctagattcgaagttgtttggtgtccggcaacaatgactcttgaagagataattagggattggaatcccgacgcattattcgcatctaatggccctggtgaccccgctcatcaaggagctgcaaccgatgcaagaaaaaccctagcagaagctgtgcgccttgggatgcctgttatgggaatttgtcttggtcatcaactgatgggtttagctgcaggactaaggacatacaagctaagatatgggcacagaggatccaatcaa

SEQ ID NO: 319107 - DNA, 490 bp, Unknown
  Bacterial polypeptide expressing nucleotide sequence isolated from the Sargasso Sea
atgcttaaggaaagatatttaattttaaatgatggatctgtatatcaaggctatggtttcggatatgaaagtgaagcaattggtgaggtagtttttaatacttctatgaccggatatcaagaaatgctgactgatcctagttatagaggtcaaatattagtatcaacttatccaatgattggtaattacggaatagatagcaattttagcgaatcaaacaaagtgcaagtaaaaagttatgttgttagagatttatgtgattatccttttcatttttctaataataaagatctgaatgaatttttaacagaaaataaaatacctggaattcattctatagacacacgctctttaaccagaaaaattagaaagtttggatcaaaaatggccattatgactgataatccagacttaaatgttgctttagaaaaaataaataaatttggttcatatgaagaaagtaattatgttgatcaaagtttctgtaaaa

SEQ ID NO: 319108 - DNA, 358 bp, Unknown
  Bacterial polypeptide expressing nucleotide sequence isolated from the Sargasso Sea
atttggaatatgccttggacaccaactattagctttggcacttaaagcaaaaacaaaaaaaatgaaattaggtcatagaggtgcaaatcacccggtaaaaaatttaattaatagtaaagttgagattacaagccaaaatcatggatttgaagttgttaaagaaagtttgccaaataatgttcaaatgactcataaatctttatttgacaattctgttgaaggaataaaattaaaaaataaacctgttttttctgttcaatatcacccagaatcaaatcctggcccacaagatagtcattatttatttaaccaatttattaacgacgtaaaaaaaaatgccaaaaagaaaagatattaa

SEQ ID NO: 319109 - DNA, 735 bp, Unknown
  Bacterial polypeptide expressing nucleotide sequence isolated from the Sargasso Sea
atatcaataaattgactaattctacaatcaaatggagtggattaaaaaatcttgatctggcagaagtagtttcaacccagaaaaattatatttggaaaggttttaaaacatggaaaaaagaacttggatataagaaaaataataaaaattcatttcatgttgttgcaattgattatggaattaaaaaaaacatcttaagatatttctctgacttcaactgtaaagttacagttgtctcctgtaaaactagtgcccacaaaattttagctttaaaaccaaatggaatatttttatcaaatggtcctggtgatccagctgcaacagggaaatatgctatagaaattattaaagatctaattaaaaaaaatttaccaatatttggtatttgtttgggtcatcaaattttagcattggcattaggtggtaaaacaaagaaaatgaaacttggtcatagaggagcaaatcaccctgttaaaaatttaattcatgataatgttgagataacgagtcaaaaccatggatttgaagtagttaaagaaacattaccaaaaaatattgaggtcacacataaatctttatttgataatagtattgaaggtatcaaactaaaaaataaaccagtcttttcagttcaatatcatccagagtctaatccaggacctcaagatagtgtttacttgtttcaacaatttattaacaacatgaaaaaaaatgccaaaaagaaacgatattaaa

SEQ ID NO: 319110 - DNA, 495 bp, Unknown
  Bacterial polypeptide expressing nucleotide sequence isolated from the Sargasso Sea
ttgtcccctgggacacgcttgctgaagtagttcggcagatgaatccagatggtgtttttctttccaacggccccggtgatcctgccgcagtagaaagcgccattgaagaagtccgcagcctgctcggggttttcccgattttcgggatctgtctcgggcatcagattttggctttggccttgaactgcaaaacctacaaactcaaatgtggacatcatggagggaaccatcctgtaatggattatcaaaccaacaagattgagatcacaagccataatcatggattctctgtggacgaggacagtctccctgaagacgtcagagtgacccacaggaatcttaacgatcagacggttgaaggtctggaatcgcttcagttccctgcctattccgttcaataccaccccgaggcggcaccaggcccgagggatgcccgttatctcttcaaacggtttgttgagatgatgggaaacaccaagtgttggagttcctgag

SEQ ID NO: 319111 - DNA, 549 bp, Unknown
  Bacterial polypeptide expressing nucleotide sequence isolated from the Sargasso Sea
aacaaaatatactaagacaccttgttaatttaagtgctgatattattgtattaccagaagatactaattttgaaaaaattgcaaattttgaaccagatggaattttcttatctaacggaccaggagatcctgcagcaacagaaaaaaaatgtagaaaagtacttaagtcaatattcaagttaaatattcctgtttttggaatatgcattggtcatcaattaattgggctgtcttttggtgctagaaccagtaaaatgcctcaaggacatagaggggctaatcacccagttaaaaatttattgaataataaagttgaaataaccagccaaaatcacggttatcaaatagatttagactctcttcctgagtgttttgaaattactcacacttctttgtttgacaactcaatagaaggcctcaaacataaagatcttccaatattttctgtacaataccatcctgaagcctctcctgggccaactgagtcctcttatctatttgaagaatttttaaattatataaaagtatcaaaaaatgccaaaacgtagt

SEQ ID NO: 319112 - DNA, 759 bp, Unknown
  Bacterial polypeptide expressing nucleotide sequence isolated from the Sargasso Sea
catatcggtaatgttggaacaaataatgaggacttggaatctgataaaatatggacaagaggagttatttttaattcagaaattacaagcccatcaaattataggtctattaaaaatctggatgaatggttaaaaaaaaataaaatagttggaataactggcctggatacaagaagtctaactaattttattagagacaagggcgctcctaaaggcacaatatctaacaataaaaaaggcaattttaatattaaaaaattaattaatatctctactaaatggcctggattaaatggcttagatttagccaaagaagtatcaacaaaaaaaacatatacttggaaaggattaaaaacttgggaaaaaggcaaaggtttcaaaaaaaataaaaagaaatcattaagaattattgcaatagactatggaataaaaaaaaatattttaagatatttttcaaactacaattgcgaagtaaaagtagtttcatgcaaacaaactgctgatgaaatattaaaattaaaaccaaatggtatatttttatcaaatgggccaggtgatcctgcggcgacaggggtatatgcaattgaaactgttcaaaaattaattagatctaatttacctgtttttggaatttgcttgggacatcaaattcttgctttagcattaaatggaaaaacaaaaaaaatgaaactcggacataggggtgctaatcatccagtaaaaaatttaaacaataaaaaagttgaaataacaagtcaa

SEQ ID NO: 319113 - DNA, 472 bp, Unknown
  Bacterial polypeptide expressing nucleotide sequence isolated from the Sargasso Sea
tcctgcaaaaactaaagcacatgaaatcttatcttatgacccagatggggtgtttctatcaaatggaccaggagatcctgcagctgttggatatggtattgagacaataaaaaaactccttggagtgaagccaatatttggtatatgtctagggcatcaattactagctctttcgctaggagcaaaaacattcaaactaaaatttggacatcgtggtataaatcacccagttaagaatattaacttgggaacaattgaaatcactagtcaaaatcatggctttgcagttgaacttgatagtttaccaaaaaatatattgtctactcatattaatctgaatgataacacctctgcgggaatcgagtgtgttgatcatcctgctttttcagttcaatatcatccagaatcaagcccaggcccgcatgatagtcgttatctattcaaaaaatttattggaatgatggatgcctaa

SEQ ID NO: 319114 - DNA, 703 bp, Unknown
  Bacterial polypeptide expressing nucleotide sequence isolated from the Sargasso Sea
atccacagatgctaaaaaagaattagaaaaattttctggactcggggggcttgatttagcaaaggtagtttcaacaaaagattcatatacttgggatgagggtgtgtggcctgatttcaaaaaaacttcatcagattttcacatagtggcaattgactttggaataaaagaaaacatcttaaggctgctggctgaacatgtcgggaaaataactgtggttaatgcgcaaacaccaattgaggaaattctaaatttgaaaccagatgggatctttctatccaatggacctggagatccagaaccttgcgactacgcaattgaaaatatcaagattgttttggacaaaaaaattccaatttttggaatttgtttaggacaccaacttctagcaattgcaggcggttgcaaaacttacaaaatgaaatttggtcatcatggcgctaatcatcctgttcaagacttaagatcaaatgaagtagcaataactagtcaaaatcacggttttgctatcgaagaaaaatctatacccgaggatataaccattacccatcgctcactatttgataagtcaattcagggaatacaatttgataataagccagcatttagttttcaaggacatcctgaggcgagccctggaccccatgagctcattagcctatttaataaatttaaagacatgattgaggaaaataatgcctaa

SEQ ID NO: 319115 - DNA, 778 bp, Unknown
  Bacterial polypeptide expressing nucleotide sequence isolated from the Sargasso Sea
cgcattcgcgatctgggagcaccgcacggaacgttgtgccacgcacctgagggggccattgactttgactctctgcgtgaaatggccgctgggtggccgggcttagcgaatatggatttagcgcgtgaggttacttgtgacaaggcatatgattggcggcaaggcagctggcagatggatcaatccgcgcaccggaaaacaacggcagaatataaagttgttgctgtggattttggctgcaaacataatattttgcgctgtcttgaggatgcgggatgtgcggtgcatgtggtgccagccaaaaccaccgctgatgagattttggcgcttaagcctgatggcgttttcttatccaatggccccggtgatcctgcggcaacctctgcctatgctggaccgcagattgccaaactgattgatcagaatataccgatatttggcatttgtattggccatcaattgatggcgctagcgcttggcgccaaaacacacaaaatggaccgtggccatcgcggcgccaatcatccggtaaaggatctcgaaactggcaatattgaaattaccagccagaatcacggctttacagtggatctggatagccttccagataatctacttgtatcgcatatttcgctatttgaccattcaattgaaggcctacgtcacgctagcaaaccggcattttgtgtccaataccaccctgagtcatcacccggaccgcatgattcgcgatacctgtttgaacgcttcaccgacttaagaaaaaaacgagagtcta

SEQ ID NO: 319116 - DNA, 400 bp, Unknown
  Bacterial polypeptide expressing nucleotide sequence isolated from the Sargasso Sea
attgatacgcgttcaaaaattaatcaaattaaattttcctatatttggaatttgccttggtcatcaaattttagctttagctttgaatgcaaaaacaaaaaaaatgaaattaggtcacagaggtgctaatcatccagtcaaaaatttaataaataattcagtcgagattacaagtcaaaatcatggatttgttgttatagaaaaaagcctatctaagaatattcaaattactcataagtcactttttgacgatactattgaaggaattaaattaaaaaacaaacctgtcttttctgttcagtatcatccagaagcaaatcctggaccacaagacagccaatatttatttaataattttattcaagatgtaaaaaaatatgccaaaaagaaaagatattaa

SEQ ID NO: 319117 - DNA, 604 bp, Unknown
  Bacterial polypeptide expressing nucleotide sequence isolated from the Sargasso Sea
ttttattagagataagggtgccccaaaaggtaccattacaaataataaaaaaggtaaatttaacattaaaaaactaactaatatgtcagtcaaatggcctggcttaaatggattagatcttgctaaagaagtatcaacaaaaaaaacttatatatggaaagggtttagaacgtggaaaaaagatatcggatacaaaaagaatacaaaaaagaaattcaaaattatcgcagttgattatgggataaagaaaaatattttaagatatttcgcagattacaattgtgaggtaaaggtagtctcttgtaaattaactgctgatgaaattgtgaaatttaaacctgatggtgtttttttatcaaatggacctggagatccagctgctactggaaaatatgcaattgatacagttcaaaaattaattaaattgaattatcctatatttggaatttgcctcggtcatcaaattttagctttggctttaaatgcaaaaacaaaaaaaatgaaattaggtcataggggtgcgaatcatccagtcaaaagtttaataaataattcagttgagattacaagtcaaaatcatggatttgttgttatagaaaaaagc

SEQ ID NO: 319118 - DNA, 808 bp, Unknown
  Bacterial polypeptide expressing nucleotide sequence isolated from the Sargasso Sea
atgtcttataaaaagaggaaaaaagggattgtacttctagctgatggaacaattttttatggtaaatctgtaggtgtagaaggaactgttattggtgaaatttgtttcaatacgggtgttacaggttatcaggagatttttaccgacccatcttattatggacaaatcatggttacgaccacttctcatataggtaattatggaataaaagaaaatgagtctcaatctgaaaaaatatatatatcaggacttatttgtaaaaattttagctatgttaattcaagggtatcttcaaggtctgtagattcatggtttaataaacagaaattgattgcaatttcagatgttgacactagagctctagttagatatattagagaaaatggtgctatgaatgcagcaattactactgatatagataatttggatgaattaaggaaaaagttgattaattctccagagatggaaggtttagaattggcttcaaaagtatcaacaaaaaaggcatactttttaggaaacgaaaaagcaaaatatagactagctgttttagatcttggagttaaaaaaaatattttatccaatttcatcaatagagatttttatataaaagttttcccttataatactgaatttaatgaattacttaaatttaagccaaatggtttctttctttcaaatggcccaggagatcctaagcctctagaaaaagtaattgaaacaactaaagaaataattaaaagtaattttcctctttttggaatttgtcttgggcatcaagtcatagctttagctaatgggattaata

SEQ ID NO: 319119 - DNA, 886 bp, Unknown
  Bacterial polypeptide expressing nucleotide sequence isolated from the Sargasso Sea
cttcaatacttctttaacaggttatcaagaaattatatctgatccatcatatgctggacaaattatcaactttacttttccacacattggaaatgttggtactaacaaagaagatcatgagtcagacaagatttggactaaaggggttatttttaatacagaaataactaatccatcaaactacagatctttaaaaaaattggatagttggttgaaaaaaaataagatagtaggaataactggactagatactagaagcttaaccaattttataagagacaaaggagcgcccaaaggcactatctctaataataacaaagggaattttaatttaaaaaaattaaccagaaattctattaaatggccaggattaaatggccttgatttagcaaaaatagttacaaccaaaaaaaaatacatatggaaaggttttaaaacttggaaaaaagaaaaaggttttgaaaaaaataaaaataaaaaatacaaaattattgcaattgattatggaattaaaaaaaatattttaagatatttttctaattttaattgtgaagtaattgttgttccatgtggccttaaagctgaagatattattaaattaaaacctgatggtatttttttatcaaatggtcctggggatcctgctgcaacaggaaaatatgcaatagatataattcaaaaattaattaaaacaaatattccaatatttggaatatgtcttggacatcaattgttagctttagcacttaaagcaaaaacaaaaaaaatgaaattgggccatagaggtgcaaatcacccggtaaaaaatttaattaatagtagagttgagataacaagtcaaaatcatggatttgaagtagttaaagaaagttaccaaaaaatgtga

SEQ ID NO: 319120 - DNA, 643 bp, Unknown
  Bacterial polypeptide expressing nucleotide sequence isolated from the Sargasso Sea
ggtggtctacgacggcatcttcatgtccaacgggcccggcgaccccaccatgtgcgcggccacggtcaagtccgtgcagtgggccatcacgcgcccggcggaagagatcaagccgctcttcggcatctgcctcggcaaccagatgctggcgctcgcggcgggggccaagacctacaagatgaagtacggcaaccgcggcgcgaaccagccctgcatcgacctgcgcacgggcaactgctacatcacgccgcagaaccacggcttcgcggtggacaacaagtccctgcccgcggagtggaagaccttcttcctcaacggcaacgacttctcgaacgagggcgtgatccacacgaccaagccctttttctcggtgcagttccaccccgaggcggcgggcggccccatggacacgtccttcctcttcaacatgttcgtggacctcctcaacggcaagccgcgcacgcagccgctcatctcgcccgacgtgtacctgccggcgcagtcgcccgtgcgccgcgtgctgctcctgggcagcggaggcctgagcatcggccaggccggcgagttcgactactcgggctcgcaggcgatcaaggcgctcaaggaggaggggctcgaggtgatcctcatcaaccccgacatc

SEQ ID NO: 319121 - DNA, 301 bp, Unknown
  Bacterial polypeptide expressing nucleotide sequence isolated from the Sargasso Sea
gatgaggatacaagccttgagcacaccagcaatccttgcactcgcagacggaagcctcttctacggcaccgccatcggcgcagacggagaaaccagcggcgaggtagtgttcaacactgccatgaccggctaccaggaaatcctgaccgatccgtcctactcccgccagatcgttaccctgacgtatccgcacattggcaacaccggtgttaacgaagaagacgtagaatccgaccgcatccaggccgctggcctgatcatccgggatctgcccctgctcgccagcagctggcgaaacaag

SEQ ID NO: 319122 - DNA, 883 bp, Unknown
  Bacterial polypeptide expressing nucleotide sequence isolated from the Sargasso Sea
aatagttagaaactattcgtcaaataatagtaattggagatcattgatgagttttaatcaatggttagatgaaaaaaatataattggtctctatggaattgatacaagagctcttgttaaaatcttaagatctaatggctcgatgaatggagttcttacttcagaagatatatctgtagagagttgtttagaaatgctctatgaaagtccaaaaatggaaggattaaatttatctaaagaagtttccacaaagcaaaaatatttatggaacaatccttcggaaacagattttgacataagaaagaaatattcggaaaaaaataataaattcaaaatcgtagcaattgattttggaattaaaaaatcaattttaaatagattagtctctcacggttgtgaaattttagttttaccatcaagatcatctttagaagatgttctatctactaagcctgatgggatattcttctcaaatggacctggtgatccttcttctgtcactgaagggattgatttagcaagatcacttattgaactgggtgaaatacctatgtttggaatttgccttggccatcaaatatttggattagccttaggtggtacaacttacaagctaccttttgggcatcgaggtttaaatcatccttgtggaaagaatcatcaaattgagataactagtcagaatcatggttttgctattgaccctgattctctctcaaaagacttagtcaaaataactcattttaatcttaacgataatactgttgcaggtttggaagtaaataacaagccaatatttagtgttcaatatcatccagaagcaggacctggtccccatgattcagattatttatttaaaaaatttgtttctctaatgtcagaa

SEQ ID NO: 319123 - DNA, 828 bp, Unknown
  Bacterial polypeptide expressing nucleotide sequence isolated from the Sargasso Sea
taactggaattgatactagaagtcttactaattttattagagaaaagggagcaccaaagggaactatatctgtaaataagaatggtaattttaatataaaaaaattaacaaatctctcaattaagtggtcaggtttaaatggtttagatttagctaaagaagttacaactaagaaaacatataagtgggaaggcttacagacatggcagaaaggattaggttataaaaaatcaattaaaaataatttaataatagtagcaatagattttggtataaaaaaaaatattcttagatatttctcaaattataactgcgaagtaaaggtagtttcttgtgacttgtcttcagaaaatattattaaatataagccccacggaatatttctatctaatggacctggtgatcccgctgctaccggaaaatacgctattccattaataaaagaacttataaataaaaatatacctatattcggtatttgtttaggacatcaattgttaggtctagccttaaacgcaaagacaaaaaaaatgaaacttggccatagaggtgctaatcatcccgttaaaaatttgttaaatggaaaggtggaaatcactagccaaaatcatggatttgaagttgtggaaaaaagtcttccaaaaaatgtggaggtaacacataaatctttatttgataattctgtcgaaggtttaaaattgaaaaacaaaccaattttttctgttcaatatcatcctgaggcaaatccaggtccacaagatagcaaatacctattcgatctatttataaaagaagttaaaaactatgccaaaaagaaaagatattaaa

SEQ ID NO: 319124 - DNA, 550 bp, Unknown
  Bacterial polypeptide expressing nucleotide sequence isolated from the Sargasso Sea
aaaaatattttaagatatttttctgattataactgtgaaattaaagtagtttcttgtaaaaaaactgctgatgaaattattaaacttaatcctgatggtatttttttatctaatggtcctggagacccagcagcaactggagagtatgcgattgataatataaaaaaattgataaaatttaaatatccaatttttggaatttgccttggtcatcaaattttagctttagctttgaatgcaaaaacaaaaaaaatgaaactaggtcatagaggtgcaaatcatccagttaaaaatttaattactaactctgttgaaattacaagtcaaaatcatggttttgttgttatagaaaaaagcttatcaaaaaatattcaaataacccataagtcactttttgatgattctattgaaggaataagattaaaaaataaacctgtcttctctgtccaatatcatccagaagcaaatcctggaccgcaagacagtcaatatttattcaataattttattcaagatgtaaaaaaatatgccaaaaagaaaagacattaaa

SEQ ID NO: 319125 - DNA, 424 bp, Unknown
  Bacterial polypeptide expressing nucleotide sequence isolated from the Sargasso Sea
cccgcagcaactggtaaatatgcaataaaaactatacaaaacttaataaagtggaattatccaatctttgggatctgcttgggccatcaaattttagctttagcattaaatgctaaaacaaaaaaaatgaagttaggccataggggagcaaatcatccagtaaaaaatttaattaacaacaaagttgagattacaagccaaaatcacggtttcgttgtgatagaaaaaagcttatctaaaaaaattcaaataacccacaagtcactttttgataatactattgaaggtataagactaaaaaatagaccagttttttcagttcaatatcacccagaagcaaatcctggaccacaagatagtcaatatttatttaaaaactttattcaagatataaaaaaatatgccaaaaagaaaagacattaaa

SEQ ID NO: 319126 - DNA, 901 bp, Unknown
  Bacterial polypeptide expressing nucleotide sequence isolated from the Sargasso Sea
aattgttaatttcacatttccacatattggtaacgttggagcaaataacgaagatattgaaaccgcgaatccagatcaagaaatacacatatctgggatcataacgcattcatacattgaaaaaccatcgaattatagatctgaaagcactctttctgagtggatgagggatagaaaaatcataggcatttctggtgttgacacaagatatataacaaaacttattagagacgaaggaatgatgagttgtcttatagaacatcggcatgatggtatatttgatatacctaaattactcaaaatacttgaaaatgtaaaaaaaatggaaggtttagatcttgctaccgaagcttccacaagctgtatttataatttaaattcgaaagcatgggagtgggatagaggatatagaaaaaataatcatacaaaaataaagattgctctaattgattatggcataaaaacaaatataattagaatgctcaatacatatgattgtgaaaccaaaatatttcccgcaaaaacagaaatagatagtatcatgaaatatgatccagatggcgttctcctatccaatggccccggagatccagaggcaacatccgcatatagccttgaactaattagagatattattgacaaaaatatacccatatttggcatatgcttaggccatcagatattagctcttgctttggggggtgaaacaaaaaaaatgtcttttgggcatcatggggcaaatcatcctgttcaagatttgagtaataaaaaagttcagataacatcaatgaatcatggttttacagttgatatggaaaccctaccgagtaatgttaaggagacacatcgatcactatttgatcaatctaattgcggctttgaagttaaagataaaccaatt

SEQ ID NO: 319127 - DNA, 886 bp, Unknown
  Bacterial polypeptide expressing nucleotide sequence isolated from the Sargasso Sea
ttcctactccgttggtgaaattgtattcaatacagcaatgaccggttaccaggaaatcatcacagacccttcataccataaacaaatcgttaccttaacctatcctcatataggaaacactggcaccaatgaagaagacaatgaaagcaaagactcattttgttcaggtctagtcatccgtgaaagttcgccaatctctagcaactggagaaacaaactcagcttggaagattttttggttagaaataaaatagtcggaatttccaatatagacaccagaaaactcacaaatcatctgagaaacaatggatcaatgaatgcctgtttggcggctaatggattaagtcataaagaagcactaagtgaagcaaaatcttttccaggtcttgcaggcttggaccttgcaaaagaagtttcaacaaaaactgcttatgaatattctccaaatatggataattcagactctctttttcatgtcgttgccatcgattatggtgtaaagacaaatattctcaatctgctatcgaaaaatgggtgcaaagtaaccgtaataccagcacaatcgtcatatgatgaagtaatgtcatatgatcctgatggagtgttcttatcaaacggtccaggagatccagagccttgtgattatgcgattaagtgcatcagaaaattgcttgaattaaatatcccactatttggaatttgtcttggtcatcaactcttagctctggcatcaggcgctaaaacagagaaaatgaaatttggacatcacggtgccaatcatcctgtaattgatacagaaacaggagttgtatacatcactagtcaaaatcatggttttactgtcaatgagaactccattccagaaaatgtcaacatcacgcataaa

SEQ ID NO: 319128 - DNA, 682 bp, Unknown
  Bacterial polypeptide expressing nucleotide sequence isolated from the Sargasso Sea
ggatcttgcaaaagaagtatcaacaaaaaaaacttactcgtggaaaggttttaaaacttggagaaaagagactggatacaaaaaaaataacaaaaagatatttaagatagttgcgattgattatggaataaaaaaaaacattttaagatatttttctgactataattgtgatgtaaaagttgtttcttgtaaaataactgccgaagaaattataaaacttaatcctgatggaatttttttatcaaatggcccaggagatccagctgcaactggaatatatgctattaaaactatacaaaaattaataaagtggaattatccaatctttggaatctgcttgggtcatcaaattttagctttagcattaaatgctaaaacaaaaaaaatgaagttaggccacaggggagcaaatcatccagtaaaaaatttaattaacaataaagttgagattacaagtcaaaatcacggtttcgttgtaatagaaaaaagcttatctaaaaaaattcaaataactcataagtcactttttgataatacaattgaaggaataagattaaaaaatagaccagttttttcagttcaatatcaccctgaagcaaatcctgggccacaagatagtcaatatttatttaacaactttattcaagatataaaaaaatatgccaaaaagaaaagatattaa

SEQ ID NO: 319129 - DNA, 762 bp, Unknown
  Bacterial polypeptide expressing nucleotide sequence isolated from the Sargasso Sea
gcccgcgggctaatccttcgcgctaacatcacccatccgtccaactggcgggcgacccaacatctggatgaatggctgaaaagccacaatcttaccggcctcgccggcgtcgacaccagacggctgacccgcctgattcgcgagtcgggcgcacctacgggggtcgtctgcaacgcgctggacgggaagtttgatcttgacgcgctgacatccgcggccacggactggcccggcctggagggcatggacctcgcgaaagaggtgacctgccaccagacgtatgactgggacgaaagcacctgggccctgcacgatggctacggcaagcaaaccgcgcccgcctgccatgtggtggcgatggatttcggcgccaagcgtaacattctccgctgccttgccgccgccgggtgcaaggtgaccgtggtgccggcaaccaccagcgccgaaaacgtcctgcgccacaagccggacggcattttcctgtccaacggcccgggcgatccggctgccaccggcctctatgcagtgccggtgatcaagcagcttgtgaaattcgacatgccgattttcggtatctgcctgggccaccagttgctcagcctcgcgctgggcgcaaagaccaagaagatgcatctgggccaccgaggtggcaatcacccggtaaaggatttggcgactggcaaggtggagattaccagccagaaccatggcttcgtcgtcgacgagaccaccctgcccgaaggcgtagaggtgagccacgtg

SEQ ID NO: 319130 - DNA, 853 bp, Unknown
  Bacterial polypeptide expressing nucleotide sequence isolated from the Sargasso Sea
cccgagcttggcaataccggcgtcaatgacgaggaccttgaagcggatgcgcctgctgtgaaggcagttctctgtcgctgtctggcacctgagcccagcaattggcgcagcagcggtcgcctggagcattggttagagaagcatggtgttgtcggcctgatgggcatcgatacacgtgctgtcgtgcgtcaactcagggagggaggagccatcaatggtgctgtgagcacggatggtacgagcccagctgatctgttgaagcaggtgttggcagctccttcaatggcgggccagaacttggccaagcaggtctcaacatctgctgcttaccggtggagctcacccactgcagcctcttttgatcagcgcattcaggctcaaccttcccggcgttatcgcgtcgtcgccatcgatttcggaatcaagcgagcgatcctcgagcgactgagcgcccatggttgtgatgtggatgtgctgccagcagataccgatgccgaggctgtgcttgctcttcagcccgatggtgtcttcctctcgaatggtccaggcgatccctcggccgttggtagcggcatcgccttggccaagcagcttttgggcgacccagcgttgccgatgtttggcatttgtctcggccatcaaattcttggcttggccttaggaggcaccaccttcaagttgggttatggccaccgcggtttgaatcatccctgcggtggttcaggcctggttgaaatcacaagccagaaccatggttttgccttggatgccaactcccttgaccctcagcaggttgctatcacccatcacaacctcaacgaccgcacggtggccggtcttgaacttcgtgatc

SEQ ID NO: 319131 - DNA, 797 bp, Unknown
  Bacterial polypeptide expressing nucleotide sequence isolated from the Sargasso Sea
aatggttgggactaacaaagaagatcacgagtcagataaaatttggactaaaggagtaataataaatacagagataacttatccatcaaattacagatcattaaagcatttagatcaatggttaaagaaaaataagattgttggaataactggcattgatactagaaatttaacaaatttcattagagataaaggtgctcctaaggggacgatatctttttataacaaaaataaattaaacataaaaaaactaattaaaataactaataaatggagtggccttaaaaacttagatttggcaaaaatggttactacaaagaaaaattacttgtggcaagattataaaacatggaaaaaggaaaatggatatttaaaaaataaaaaaaaaatattgcatgttgtggccgtagattacggaattaagaaaaatattttaagatatttttcagattttaattgtaaggttacaatcgtaccatgcacaacaggtgcaaaagatattctaaaactcaagcctgatggaatatttttatcaaatggacccggagatcctgcggcgacagggaaatatgcaataccgacaatccaagaattaatcaaaaaaaagttaccattatttggaatctgtttgggccatcaaattctagctttagcactcggtgctaagacagaaaaaatgaaattaggtcacagaggagctaaccatcctgttaaaaatttgattgagggcaatgttgaaatcacaagtcagaatcacggattcgaagtagtaaaaaagggtatgcctaaaagtataa

SEQ ID NO: 319132 - DNA, 777 bp, Unknown
  Bacterial polypeptide expressing nucleotide sequence isolated from the Sargasso Sea
cacccaaaggtactatctctaataataacaaaggtaattttaatttaaaaaaattaaccagtaattctattaaatggccaggattaaatggccttgatttagcaaaaatagttacgactaaaaaaaaatacatatggaaaggtttcaaaacttgggaaaaagaaaaaggttttgaaaaaaataaaaagaaaaaatataaaattattgcaattgattatggaattaaaaaaaatattttaagatatttttcaaattttaattgtcaagtagttgtagttccttgcaatcttgaagctaatgaaattattaaattaaaacctgacggtatttttttatcaaacggccctggagatcctgctgcaacaggaaaatatgccataggtataattcaaaaattaattaaaacaaaaattccagtatttggaatatgtcttggtcatcaattgttggctttggcacttaaaggaaaaacaaaaaaaatgaaattgggtcacagaggtgcaaatcatccagtaaaaaatctaattaatagtaaagttgagataacaagtcaaaatcatggttttgaagtagttaaagaaagcttgccaaaaaatgttgagatgactcataaatctttattcgacaactctgtagaaggaataagattaaagaataaacctatcttttctgttcaatatcatccagagtcaaatcctggcccccaagatagtcattatttgtttaatcaatttattaacttagtaaaaaaaaatgccaaaaagaaaagatattaaa

SEQ ID NO: 319133 - DNA, 803 bp, Unknown
  Bacterial polypeptide expressing nucleotide sequence isolated from the Sargasso Sea
cattacatttactcatcctcatataggcaatacaggtataaattctgaagataatgaatcagacaatatatatgctgaaggagttgtcataagaaattatatctctcagccaagcaattatagatctgaagaaaatcttgatgatttcttgtcaagaaataattctattggaatttttgggatagatactagacagctaacaattattctaagagaaaaaggctcattgaaggcatgcattagtccgatagatgaaaataatgaacaatcagcaatatctttagcaaaaagctttgagggtcttgaaggaatggatttagccaaagaagtaacaacgaaagatttatattcttggaatgaaggagtctggcctgagtatatagagtctaaaagcaagctgcatatcgttgcatatgactatggaattaaaaagaatattttaagactcctctctgagcacgtagggaaggcaacagttgtaaatgcaagatgctcctttgatgaggttattaagatgaaaccagatggtatctttttatcaaatggacctggcgacccagagccatgtgattatgctatagaaaatattaaaagggctcttaatgaaaatattcctatatttgggatctgcctaggtcaccagctattggcgttagcaggcggagcaaagactgaaaaaatgaaatttggtcatcacggagcgaatcatcctgtccaatctttaaattctaaggaagtgtttataacgagtcagaatcatggctttgctgtgaataaggattcattaccaaataatattgaga

SEQ ID NO: 319134 - DNA, 451 bp, Unknown
  Bacterial polypeptide expressing nucleotide sequence isolated from the Sargasso Sea
aatatttttatcaaatggtcctggtgatccagctgcaacagggaaatatgctatagaaattattaaagatctaattaaaaaaaatttaccaatatttggtatctgtttgggtcatcaaattttagcattagcattaggtggtaaaacaaagaaaatgaaacttggtcatagaggagcaaatcatcctgttaaaaatttaattcatgataatgttgagataacgagtcaaaaccatggatttgaagtagttaaagaaacgttacctaaaaatattgaggtcacccataaatctttatttgataatagtattgaaggtatcaaactaaaaaataaaccagtcttttcagttcaatatcatccagagtctaatccaggacctcaagatagtgtttatttgtttcaagaatttattaacaacatgaaaaaaaatgccaaaaagaaaagatattaa

SEQ ID NO: 319135 - DNA, 630 bp, Unknown
  Bacterial polypeptide expressing nucleotide sequence isolated from the Sargasso Sea
cgatgaaagggcttgatcttgcaaaagctgtaagtacaaaaaagcgttacgtatggtccaaaaaaggaacatatcgcgtagcagctattgattacggaattaaaaataacatacttagacttcttgagaagcacgattgtaaagtgaccgtttttccttgcactgcatctgcgaagacaattttggcttttaaaccagacgggatttttttaagcaatggaccaggagatcctgctgcggtaacctatgggatagatttagtacaagagctactagggaaaaaacctatatttggtatttgtttgggtcatcaaatattagctctagctttgggagctaaaacatttaaattaaaatttgggcatcgaggtataaatcaccctgtgaataatttaactcataataatgttgaaattacgagtcagaatcatgggtttgctgttgatcttaatactcttccaaataatgtcaaatcaactcatattaatttaaatgatcaaacaagcgcaggaattgaatgcgcagaccataaagcgttttcagtccaatatcatccagagtccagccctggaccccatgatagcagatatttatttgaaaaatttaccaaaatgatgaaaggcagttaaa

SEQ ID NO: 319136 - DNA, 918 bp, Unknown
  Bacterial polypeptide expressing nucleotide sequence isolated from the Sargasso Sea
atgctttatacctcacaaacagggtatcaagaaactctaactgacccgtcttatgctaaacaaataattaccttcacctttcctcatattggtatcacaggaacaaattcagaagatttagagtctgatagaatatttgcagaaggctgtataattaatcagccaattggaaattactctaattggagagcagaaaaaaaattagacgtttttttaagtaatcaaaaaacgcctggtatatctggtatagatacacgatatttaacaagaagattatctgaaaatggggctgaaaaagttgctttaataaattttggagataataaacatgattttcaaaatctacaaaaaaatttagctgagtggaagggtcttgaaaacttagatttagcatcactggtttctacaaaaaaacaatttacatgggatgagggtttatggaagaaaccaaataaacaaaattcttacaaaaattttccaattgtttgtttagattttggaattaagcataatattctaagaaatttaaatgaactcaattttgcaacaacaatattaccttcatcaagttcaataaaagaaattttagataataaaccaaaaggaatttttttatctaatgggcctggggatcctgatgctacaataaaagtaatactgcctactataaaagaacttattaatcttaaaatacctatttttggaatttgtttaggtcatcaaattattagtttagcattgggagctaaaacaaaaaaaatgtttcaaggtcaccgcggagcaaatcagccagtaaaaaatttaattaatcaaactgttgaaataacatctcaaaatcatgggtttgaggttgaaaggtcaagtttaccaaaccatttaatggaaactcatatttctttgtttgatggatcgaacgaa

SEQ ID NO: 319137 - DNA, 260 bp, Unknown
  Bacterial polypeptide expressing nucleotide sequence isolated from the Sargasso Sea
tttgtccgcacaaaggtttgattccgtgatccctgcgattctggctcttgaagatggaacggtttttcggggccgatctattggcgcagccggcgaaacggtcggcgaagtggtattcaatacggcgatgacgggctaccaggagatcgtttcggatccctcatacgcccggcagattgttaccttgacttgtccgcatatcggcaacgttggcgccaatgacgaggataaggaagccgaagcggcttatgcctgtggtc

SEQ ID NO: 319138 - DNA, 923 bp, Unknown
  Bacterial polypeptide expressing nucleotide sequence isolated from the Sargasso Sea
ttccaaaaaaaaatcaaaattttctccaggtattctagttcttgaaaatgggcaagtatttaaaggtattggactagggtatgaaggattggcaactggagaggtatgtttcaatacatcgataactggttatcaagagattatttctgacccttcatattctggtcagataataaattttacatttccacacattggaaatgtagggataaataaagaggatcacgaatctgataaaatatggacaaaaggtgtgatatttaatgcagagataacaaacccttcaaattatagagcgcttaaaaacttagacatatggcttaaaaaaaataagattgttggtttaacaggtgttgatacaagaaatttaaccaatttcataagagataaaggtgcgccaaagggtacaatcgaaacaaatagaaatggaaagttcaacataaaaaaacttctgaataaatcaattagatggcatggtttaaatggtttagatttagctaaaaatgtttcaacaagatccaaatacaactggaataatcttaaaacttggaaaaagggaatcggttttgaaaagagtaagaaaaatatttttaatattgttgcaatagactatggaatcaaaaaaaatattttaagatatttagcaaatcataattgcaaaattacagttgttccgtgcgatacaagtgcagataatatatctaaattaaatccagatggagtttttttgtcaaatggtccgggtgatcctgcggcaacaggaaaatatgcagtaaaaattattcaaaaaattattaatctcaatatacctgtatttggtatctgcctaggtcatcaacttttagcattggctcttaatgctaaaactaaaaagatgaaacttggacatagaggcgcaaatcatccagtcaaaaatctttaac

SEQ ID NO: 319139 - DNA, 806 bp, Unknown
  Bacterial polypeptide expressing nucleotide sequence isolated from the Sargasso Sea
tgttacttttactaatccacatattgggaacactggagttaatgtcgatgattatgagtctagctataacggatgctcaggaattattatcagaaatcaccctacaaaagaaagtagttggagaaacgaaaataattttcttgaattcctcaaggacaaaacgatttctgctgtatgctcggtagatacaagatatttgacatcacttctaagagaaaaaggttctattaatggatgtatagtgccagatataaaaaaattggatcaagcaaaggatttattatcaaaattcccaggtctaaatggattagatttagcaaaaaatgtgacaactaaagagcaatatatttggaatgaaggaacacatgatttagtaaatgttgagtcttcaaaaggtcaaaaagagctgagagtatttgcttatgattatggcattaaaaaaaatatattaagaatacttactgatttgggctgcgatgtgactgttatccctgcagagactacttataatgaagtattgaaaaataaacccgatggagtatttctatctaatggccctggggatcctgcagcatgtgactatgccataaacaacatcagaaacttattatcaaaacaaataccaatttttggaatatgcttaggttttcagttgatgtgtttagcaagtggtgcaaaaacctataaaatgaagtttggccatcatggcgcaaatcaccccgtaattgatgttaatacaagtagggtttacataaccagtcagaaccatggatttgcagtggataaagattcattaaaaagcatcc

SEQ ID NO: 319140 - DNA, 439 bp, Unknown
  Bacterial polypeptide expressing nucleotide sequence isolated from the Sargasso Sea
gtaaaaaaaattaatcctgacgggattcttttatctaacggacctggagatcctgcggctgctacatatgcaataaataatataaaggaacttttatcgtttaaaccaatctttggaatttgcttgggccatcaaattttatcattagccttaggtatggaaacttttaaattaaagtttggccacaggggaggtaatcatcctgtaatggatactaaaagtggtaaagttgagattacttctcaaaatcacgggttcgcggtaaagaatcaaaaagtaaaaggcgtttctattactcatatcaaccttaatgataaaactgtggaagggattgagtccacagccaataaatgcttctctgttcagcatcaccctgaagcatctcctggacctcatgattctatgaagtattttgaaaagttcgtagagatgatttgat

SEQ ID NO: 319141 - DNA, 667 bp, Unknown
  Bacterial polypeptide expressing nucleotide sequence isolated from the Sargasso Sea
tgatctagctactatagtttctactgataataaatatgaaaccaatgaaagcatatgggatcaacatgataataaatataatcagaataatattggaaaatttaatattgcttgcctggactttggtattaaaaaaaatattttacgtaatttaaacaacaatttttttttaccaaaaatacttcctgctaattcatcaatagaagaaattttaaatactaatcctaaaggggtttttttatcaaatggtccaggtgatccttttgctactggaaaaatagtaattccaacaattaaaaaaataatagatatgcagattcctatttttggaatttgtttaggtcaccagatactaagtttaactttaggtgccaaaactaaaaaaatgtttcagggacatagaggggcaaatcaccctgtaaaaaatttaaagacctctcaagtagaaattacgtctcaaaatcatggatttgaagttgataaaaatactcttccatcaaatgttatcgagactcatgtttctctttttgatggaactaatgaaggtatagaacataaagagcttcctatttttagcgttcaatatcatccagaggcaagtcctggtccacatgatagccattatttatttaagaaattttataaagaagtagaaaaatatgcctaa

SEQ ID NO: 319142 - DNA, 535 bp, Unknown
  Bacterial polypeptide expressing nucleotide sequence isolated from the Sargasso Sea
aaacaacattcttcgcatgttagccgaccgcggttgtaaaataacgttggttccagcacaaacgcctgctgaagaggtattagccctaaatccagacggtgtattcctgtcgaacggtcctggcgaccctgagccatgtgactatgcaattacggctatcaaaaccatcgttgaaaccggtatacctgtgtttggtatctgtcttggccaccaacttcttgctattgcaagcggtgctaaaacagtgaagatgaagtttggtcaccatggtgcaaaccatccggttaaagacctaaagcgcaatgtagttatgatcactagccaaaaccacgggtttgcggttgatgagtctagcttgccagataacctagaagtaactcacatttcgttgttcgacaagtcgttgcagggtattcaccgcaccgacaagcctgcgtttagtttccagggtcaccctgaagcgagcccaggtcctcatgaagcggcaccgttattcgaccacttcattgaacttattgaacaacacaagcagtag

SEQ ID NO: 319143 - DNA, 361 bp, Unknown
  Bacterial polypeptide expressing nucleotide sequence isolated from the Sargasso Sea
gtttttggtatttgtctaggtcatcaaattttagcattagcgttaaatgcaaaaacaaaaaaaatgaaattaggacatagaggtgctaatcatcctgtaaaaaatttaatttcaaagaaggttgagattacaagtcaaaatcatgggtttgaagtagttaaagaaagtttgcctaaaaatattgaaattactcatagatctctctttgatgacagtatagagggaataaaattaaaaaataaaccagtcttttctgttcagtatcacccagagtcaaatccaggtccacaggatagtcactacttatttaatgattttattaacgaaataaaaaaatatgccaaaaagaaaagacattaaa

SEQ ID NO: 319144 - DNA, 838 bp, Unknown
  Bacterial polypeptide expressing nucleotide sequence isolated from the Sargasso Sea
cagaactttttcaggaacttcatttggatcaaaaggtaatgcgctaggtgaggtatgtttcaatacgggaatgacaggttaccaagaaattttaacggatccttcttattgtaagcaaattgttacgatgactgccccacacataggtaattatggtattagttcttttgacattgaatcaaaaaagatacatgttgctggttttattgttaaagaagactgtgcttatccttcaaattggagatcagaaagttcaatatcaaattatttaaaagataatggggtcgtaggtgtcaaagatatcgatacacgagccctaacaagacacatcagagatcatggatccatgaatggaattatatctaccgatatcaaagatttaaaattgctaaaaacaaagttggaatcttttccctccatgaatggtttagatttagcgaaacaagtaaccacaaaaaaaaaatataaatggcagaagatagaaaatgctatatacagagttgcagcaattgattttggtgttaaatacaatattttaagactattgacgaatcataattgcgacattacagtttttcctgctgatgtatcatcaaaagaaattcgtagatttaatccagatggaatatttctttcaaatggcccaggtgaccccgcgtcattaggctatgcaattaatactgtaaaatcatttttgggtgtaataccaatatttggcatatgtctagggcatcaaatcctggctttagcattaggcgctaaaactttcaaattgaaatttggtcatcgagggctcaatcaccctgttaagaacttggagacaggcagaatcgagata

SEQ ID NO: 319145 - DNA, 842 bp, Unknown
  Bacterial polypeptide expressing nucleotide sequence isolated from the Sargasso Sea
ttttttgggtcagggtctaggttttgaaggttcatgttcaggtgaattatgcttcaacactagtatgaccggatatcaggagattataacagatccatcgtacgcaggacaaataataacttttacatttccccacataggaaatgtcgggactaatttagatgatattgagtcaaaaaaaccaagattatctggggttattctaagatcaaaacctacctccccatcaaattttagatctaaaattgatttagacgaatggttaaaaataaataaaatagttggtatttgcgggatagacactagacttgtaactaagataatcaaaaaaggtgggccccaaaatgcaattattttgaacggggtcaaaaatcatgaagatattgataaattaagaaaaaaagcccaagatcacattaagttaaataatcttgatttagctaagactgtaagctgtttaaagccctataattggtctcaaacgttatggacagataaaaacaagtatgaggagtcatcaaactttaattataaaatagttgccatcgattatgggttaaaacagaatatattaagatcacttgtttctagtaattttgaagttcaagtagtcccagcctcagtaaatttcaatgaaataatgaatttaaagcctgatgggatctttctatcaaatggacctggcgacccagcagcaactggcaaatacgcagtaccgttaatcaaaaaaattatcaaaattaagcttcccatttttggcatttgccttggttatcaacttttgtcattagcattaggagcaaaaacaaagaaaatgtttcaagggcatcgaggagcaaacc

SEQ ID NO: 319146 - DNA, 850 bp, Unknown
  Bacterial polypeptide expressing nucleotide sequence isolated from the Sargasso Sea
gttaccttgacttacccacacattggtaatacgggaataaattatgaggatgatgaatctaacaaagtgtggacctcaggtttggtaataaaaaatctccctttcatgtcaagcaattggagaaaagaagttgatcttacaaaatatttaaatgaaaacaaaacagtagctatttcagatatcgatacgagaaaacttacttcgataatacgaagtaaaggagctcaatctgcggccataatggctggaaaaaatatttctgaaaagaaagctatttctttagcgaataaatttaaaggtttaacaggtttagatttagccaaagaagtcagcacaaagaatttttatatatggaaagaaagtacatggagaaagaaagaagccaaaatgagatttaaggttattgtcttagattttgggataaaaaagaatattcttagaattctttaccagaggggctgcgaagtttgtgttttgcccgctaagtctactttccaagaaatagcagaacttcatccagatggaatcttcctttcaaatggaccaggtgaccctgaaccatgtaaatatgccatagaaacgattaaagaattaatagcaataaatattccaatttttggaatatgtctaggtcatcaacttttatctttagctttaggaggtaaaacagaaaaaatgaaatttggtcatcatggtgccaatcacccagttaaagatttaaaatctaatgcagtttacataacaagccaaaatcatggctttactgtaaaagaaaactctcttccaaaagaagtgattattactcatcgctctttatttgatggatcaattcagggaattaagcatgtga

SEQ ID NO: 319147 - DNA, 391 bp, Unknown
  Bacterial polypeptide expressing nucleotide sequence isolated from the Sargasso Sea
tattaaaaagcttatcaatcttaagatgccaatatttggcatttgcttaggtcatcagcttttagctttggctcttaatgctaagactaaaaaaatgaaacttggacacagaggagcaaatcatcctgtcaaaaatcttttaactgacaaagttgaaatcacaagccaaaaccatggtttcgaagttattaaatcaagtttgcctaagaacgtaataataactcacaaatcgttatttgataattctattgagggaattagattaaaaaataaaccagcattttctgtacagtatcatccagaggcgaacccaggtcctcaggacagccaatatttatttgaccaattcattaaagagataaaacaaaatgccaaaaagaaaagatattaa

SEQ ID NO: 319148 - DNA, 820 bp, Unknown
  Bacterial polypeptide expressing nucleotide sequence isolated from the Sargasso Sea
ctggactagaggtgtaatatttaactccgaaattacaaatccatccaattatagatcattactacatctagaccaatggttaaaacaaaataaagttgtaggtcttacaggagttgatactcgtagcttaacaaactttataagagaaaagggtgctcctaaaggaacgttatcagttagtaaaaacgggattttcaatatcaaaaaattaataaataagtcaattaaatggcatggtttaaatggtttagaccttgcaaaagaagttacaactaagaagaattatacatggaaaggtttaaaaacttggaaaaaaggtctcggttttaaaaaatcttcggtaaataaattaagagtagtagcaatagactttgggattaaaaaaaatatcctaagatacttttcagattacgattgtgaagtgaaagtggtttcttgtaatttatccacaaaaaaaatacttgaattaaaaccacatggtgtttttttatctaatggacctggtgaccctgccgctactggcgtatatgcaattccagttatcagggatcttataaaaaaaaatattcctatatttggtatttgtttaggacatcagctgctaggattagcattaaatgcaaaaacaagaaaaatgaaattaggccatagaggtgccaatcatcctgtaaaaaattttttaactggaaaagttgaaataacaagtcaaaatcatggatttgaagtgatagaaagtagcttgcctagaaatgtgaaagtaactcataagtctttatttgataattctattgaaggggttagattagtaaataaatctgtt

SEQ ID NO: 319149 - DNA, 607 bp, Unknown
  Bacterial polypeptide expressing nucleotide sequence isolated from the Sargasso Sea
gtcaggtataaataataatgatttagccaaagttgtttcctgtaaaaaaccctacgtttatcaaaatgttactaaatctaaaaatagaataaatatagtagcaatagattttggatgtaaaaagaatattttagatctctttttagaaaacaactatagagttactgtggttccttatacatacagttatgagcaaattctgaaatttaaacctaaaggtgtatttttgtctaatggtccaggtgatccttttgctacttcaaaattagttttactgactataaaaaaattaattagaaataatataccattatttggaatttgtttaggacatcaaattcttggcttagcattgggagctaatactattaaaatgcaccatggtcatcatggagttaatcaacctgtaaaaaacctaaataataataaaattgaaattactagtcaaaatcatggctttatgattgatcctaaatcattaccgaaagaaattaaagttagtcatatttcattatttgacaaaactattcagggaatagaacatgtatcaaagcctttttttagtgttcagtatcatcctgaatcttctccaggaccccatgactct

SEQ ID NO: 319150 - DNA, 628 bp, Unknown
  Bacterial polypeptide expressing nucleotide sequence isolated from the Sargasso Sea
ggtgtcaaccaagaaaccatacattattacatcaacagctcattcaccaaaccagcaatatcatgtcgttgcgattgattttggtgtaaagactaacattctaaatttgctttccaaaaatggatgcaaggtaactgttttacccgctcaatcttcatttgatgaggtaatgaagcatgaccctgacggtgtctttttatcaaatggtcctggagatccagaaccatgtgattatgctataaaatgtatcagagaactgctcaaagcagacataccaatatttggaatatgtctcggtcaccaattattggcactggcatcaggtgcgaagacagaaaaaatgaaattcggtcaccatggtgcaaatcatcctgtcatagacactcaaacaggcattgtttacatcacgagtcaaaatcatggttttactgtcaatgaaatgacaattccagagaatgttaaagtcacacataagtcattatttgatcaatccatccagggcattgaattgaaagataagaatgcgtttagtttccaaggccatcctgaggcaagcccaggacctcatgatattcaacccttatttcaaaaattcatctcgaatataaatcatgccaaaaagaactga

SEQ ID NO: 319151 - DNA, 788 bp, Unknown
  Bacterial polypeptide expressing nucleotide sequence isolated from the Sargasso Sea
tatgatagcacgattaatatttgaagatggaacaacttttgaaggcacagctttcactaattcaggtgaaaaaactggtgaagttgtatttaacacagctctaacgggttatcaagaagtcatcacagacccttcctattctggtcaaattgttttaatgacgtacccgctcattggcagttacgggattaacaaagaagatgttgaatctcgtggattatttttacaggggcttattgttagagagtatatcgattttccaagtaattggcgctcagaaaaaacattaaagtcctatctagatgaccatggtattttgggtgttgaaaacatggatacaagagcaataacacgttttattcgtgaaaaaggttcccaaaaagcaattcttacgacatcccaggatcctgtttcggttctaatgcaaaaagcagcaaaatcaaaagatatgacaggtcaaaatcttgcaaaagatgtttcttgcatcaagccatatgtatggccaccaaatgaaaaaaaacaatttagagttgcggttatcgattgtggtgttaaatttaatattttaagagaactttctgataaaaattgtgattgccatgtctttccatacaatgtttctccagaaacaatacttgagggcaattttgatggcgtatttttatcaaatggtcctggagatcccgatgttgtgcatactgtaattgatacaattaaagggttattaggtaaagttccaatttttggcatttgtttaggtcaccaacttttaggattagcacttggcg

SEQ ID NO: 319152 - DNA, 755 bp, Unknown
  Bacterial polypeptide expressing nucleotide sequence isolated from the Sargasso Sea
agatgatttaaattcatattttttaaaaaacaaaattccatgtatttttggaattgataccagatacttaactaaaaaattatctgtcgagggagctaaaaaggcagcaattattcactttggagaaggtgaaaataaaattgaaaaacttaaaactcaaataaatgagtggaaaggtcttcaaaatttagatttggctgggatagtatcgacagagcaaaactataattggcaaaaaggaatatggaaaagtgataaattaataaaaagaaaatttaaatataatgttacttgtttagactttggtatcaaaaataatattttaagaaatcttaatgaatttaaccttaacccaactgtattaaacttattttctagctacgaagaaataatagaaactgatccttcaggaatttttttatcaaacggccctggtgatccttatgctacaggtagtaaaatagttgatgtaattaaaaaattaattgatgataatattccaatatttggaatatgtttagggcatcaaattttaggattggcattaaatgcaaagactaaaaaaatgtttcaaggtcacagaggttctaaccatcctgtcaaaaatcttacaacaggcattgttgaaattacttctcaaaatcatggctttgaagttgatagagatagttttggcaaagatataattgaaactcatgtttcgctatttgacgggactaatgaaggtttaaaacataagcatttaccagtattta

SEQ ID NO: 319153 - DNA, 320 bp, Unknown
  Bacterial polypeptide expressing nucleotide sequence isolated from the Sargasso Sea
gatcctgggcctggcccttggggggcgcaccttcaagctcggcttcggtcaccgcggtttgaatcatccctgcggcacgagcggacaggtggagatcaccagccagaaccatggctttgccctgtcctccgaggcattgccggagacgatggtcgaggtgacccacctcaatctcaacgaccgcaccgttgcagcgtttcaacatcgccatcaaccggtgtttgggatccagtaccacccagaggccagccccggtccccacgatgccgatcatcacttcggccgtttcgttgcgttgatggcggatcggcgtgactgag

SEQ ID NO: 319154 - DNA, 790 bp, Unknown
  Bacterial polypeptide expressing nucleotide sequence isolated from the Sargasso Sea
agatcttttcaacatttagacgcttggttaaaaaaaaataagatagttggaattactggacttgatacaagaagtttaacgaattttataagagataaaggtgctccaaaaggaactattgcttactcaaataaaagtaagtttcatattaacaaacttattaattctactattaaatggagtgggctaaaaaatttagatctggcagaaaaagttaccacgcaaaaaaattatatttggaaaggacttaaaacttggagaaaagaacatggctatagaaaaaataatcgaaattcatttcatgtagtagccatagattatggaataaaaaaaaatattttaagatatttttctgattttaaatgtaaagttactgtagtttcctgtaaaacatctgcagaaaaaattttatctcttaaacctgatggtgtctttttatctaatggacctggagatccagctgcaacaggaaaatacgcaattcaaataattcaaaatcttattaaaaagaaaataccattattcggtatctgccttggtcatcagatactcgcacttgcattgggtggtaaaacaaaaaaaatgaaattgggtcacagaggagcaaatcatccggttaaaaatttaattagtgaaaatgtggagatcactagccaaaatcatggttttgaagttgtaagagaaaacttaccaaaaaatattcagattactcataaatcattgttcgataatagtatcgaagggataagattaaagaataatcctgtattctcagttcaatatcacccag

SEQ ID NO: 319155 - DNA, 949 bp, Unknown
  Bacterial polypeptide expressing nucleotide sequence isolated from the Sargasso Sea
tgccgatggactctctgttggtgaagttgtttttaacacttccatgacaggttaccaagaaattctaactgatccatcctactcacgccagattgtaacattaacctacccccacattggtaatactggtaccaataatgaagatatagaatccaatggggttcacgcttgtggtcttatcattcgcgatcttccactcatcgcaagtagtttccgcaatcaacaaagcttaagtgattatctcaaagcgaacaatgtcgttggcatagcagatatcgatacccgcaagttaacgcgcattctccgtgaaaaaggtgctcaagccggttgtattatggctggtgcagacttagacgaagcaaaagcccttgacgctgccaaagctttccccggtttaaagggcatggatctcgctaaagaagtcacgactaaaactgcctatccatggcgtaaaggtagctggcgtttagtgggcggcttacctgaagatacgccagcaagtgagcttaaatacaaagtagtagcctacgactacggcgttaagcaaaacattttgcgtatgttggtggatcgcggctgcgacgtcaccgtggttcctgctaaaacctctgccgcagaagtgttagcgatgaacccagatggcgtattcctctcgaatggccctggcgatccagagccatgtgattacgcgattgaagcgattcagcagatcctgaaaaccgacacgccgattttcggtatctgtttaggtcatcagctactcgcgctggcctcgggtgcaaaaaccttaaagatgaagtttggtcaccacggtgcaaatcatcctgtgagcaatatcgagcaaggtaacgtgatgatcactagccaaaaccatggttttgctgccgatgaaacgactttacccgccaacattaaagtgacccataagtcgctatttgatggttcactt

SEQ ID NO: 319156 - DNA, 669 bp, Unknown
  Bacterial polypeptide expressing nucleotide sequence isolated from the Sargasso Sea
aggtaactactaagaagaattatatatggcaagactataaaacctggaaaaagggaaatggatacttgaaaaataaaaaaaaattattgcatgtagttgctattgactatggaattaagaaaaatattttaagatatttttcagattttaattgtaaggttacaatagtcccatgcaaaacaagtgcaaaagatattctaaaactgaaacctaatggtatatttttatcaaacggacctggagaccctgcggcaactggaaggtatgctataccgacaattcaagaattaatcaaaaaaaatttgccattatttggaatctgtttaggccatcaaatgctagctttagcgcttggtgctaaaacagaaaagatgaaattaggccatagaggagctaaccatcctgttaagaatttaattgagggaaatgttgaaatcactagtcagaatcatggatttgaagtattaaaaaaaaatttacctaaaaatataagagttactcaccagtctttatttgacaatagtattgaaggtatcgagctaaaaaataaacctgttttctcagttcaatatcatccagagtctaaccctggtcctcaagatagcgtttatttatttgataaatttgtaaaaagtatgaaaaaaaatgccaaaaagaaaagatattaaa

SEQ ID NO: 319157 - DNA, 778 bp, Unknown
  Bacterial polypeptide expressing nucleotide sequence isolated from the Sargasso Sea
ttggcgaaatgaaacagatttaaatgattttttgatgagcactaaaacagtagctatttcaaatattgatacaagaaagttagtaaatattattagaaagaagggagctcaaccaggtgcaatagttacaggaaaaaacccaaataaagacaaaggatatgagttagcaaacagtttccctggtttatctggtttagatttagctaaagaagttacgacggataaaagttattcttggaaagaaggtatatggagagaggatagtagacctaacaaatataaagttgtttcaatagattttggagtaaagaaaaatattttaaggatacttcataatagaggctgtgaaatagaagttgtaccggcaaagacaacaattgaacagatcctgtcccttaatccagatggagtttttctctcaaatggacctggcgatcctgaaccatgtgattatgctatagaaacaatcaaacaagttattaaagaaaaactaccaatttttggaatttgtttgggacatcagctattggcattagctttaggagctaaaacatcaaaaatgaaatttggtcatcatggtgctaatcacccagttcaagacttacaaacacaaaaagtttttataacaagtcagaatcatggttttatggtcgatgaagattcattaggtgaagatattgtagttacgcataaatctctttttgatggatctatacaaggaattactcataaaaccctaccagcatttagttttcagggacaccctgaagcaagtcca

SEQ ID NO: 319158 - DNA, 397 bp, Unknown
  Bacterial polypeptide expressing nucleotide sequence isolated from the Sargasso Sea
gctactgggaagtatgcagttcctgtcattcagcacttattagagaatactgaactacctatctttggaatttgcctggggcaccaaatgctagcacttgctctaggcgctaaaacaattaaaatgaaccatgggcaccacggcgcgaaccatcctgttaaagagcatagttctggaaaggtagaaatcacttcaatgaatcatgggtttgcagtggatgccgaaaccctacccagtggagtgcaagagacacatgtttcactctttgatggctccaactgtggaatcaagatgtcagacagacctgttttttctgtacaatatcatccagaggccagcccgggacctcaagatagcttttacctgttcaatcaatttgtcgccgctatggaataaa

SEQ ID NO: 319159 - DNA, 860 bp, Unknown
  Bacterial polypeptide expressing nucleotide sequence isolated from the Sargasso Sea
aattaattttacctttcctcatgttggtaacgtagggactaataatgaagatcatgagtctgacaaaatttggactaaaggtgtgatattaaatactgaaataactaatccctcaaattatagatcccttaaacatcttgatgaatggttaaggaagaataaaattgtaggtataaccggtattgatacaagaaatttaacaaattttatcagagacaaaggtgcacccaagggaacaatatcttttttaaaaaaagataaattaaacttaaaaaaacttcttaaaataactcaaaagtggagtggccttaaaaatctagatttagctcagaaagtcacaaccaaaaaaaaatatgtttggaatgactttaaaacctggaaaaaaaatgatggttttttaaaaaataaaaagaagatattacatgttgtggcaatcgattatggggttaaaaaaaatattttaagatatttttcagactttaattgcaaagtcacaattgtttcttgtaaaacaagtgctgcagatattcttaaggaaaaaccaaatggaatttttttgtctaatggacctggagatccagctgcaacaggaaaatatgctataccaattataaaagaattaataaaaaacaaattaccagttttcggtatctgtttggggcatcaactcttggctttaaccttaggtgccaaaacagataaaatgaaacttggtcacagaggagctaaccatccagtaaaaaatttaattgtaggcaaagtagaaattacaagtcaaaatcatggctttgaagttgttaaaaaaaatttaccaaaaaaaataaagatcactcatcagtctctttttgataatagtatag

SEQ ID NO: 319160 - DNA, 220 bp, Unknown
  Bacterial polypeptide expressing nucleotide sequence isolated from the Sargasso Sea
atgggcctggtgatcctagccgctacaggtaaatatgcaattaaaattattaaagaattaattaaaaaaaatataccaatttttggaatatgtcttgggcatcaaatacttgccttagcactaggaggtaaaacaaaaaaaatgaaattgggtcatagaggtgcaaatcatcctgtaaaaaatctaataaatagcaaagttgaaataacgagtcaaaatc

SEQ ID NO: 319161 - DNA, 868 bp, Unknown
  Bacterial polypeptide expressing nucleotide sequence isolated from the Sargasso Sea
tgttcaggatttattgttaaagaagcagctgaatttccttccaattttagatcaaaaatttcgctcgatgaatacttagaaaaaaataaaattattggtatccaaggtattgacactcgaatgataacccgaatgatacgcgatgaaggtgcaatgaatgctgttatttcatctagcgagctttcagatgacgatttatttaaaagattacaaaacttgccaaatatgaatgggcttgatttagctaaaaaagtaacatgcaaagagccatacttttataaaaatatggaaagtccccaatataaaattgcagcattagattttggtattaaagaaaatattctcaggatcatatcagattttaattgtgaaattaaagtattcccagctacaacaacatcatcagagattatggattataatccagatggcatttttttatctaatggaccaggcgatcctgcggcatgtacctatgcaataaaaacagtaaaggagctattgggctacaaacctatttttggaatatgtcttggccatcagattcttggtctttcacttggggcagatacttttaaaatgaaatttgggcatagaggtgcaaatcatccagtcaaaaatttagaaaccaatgtaattgaaataaccagtcaaaatcatggtttttctattgaccatgctaatcttccaggaaatattgatgtgactcatattaatttaaatgacaacaccattgaggggatcagatgtaaagaatttaatgcatattccgtacaacatcaccctgaagctagccctgggcctcatgattctcgttatttatttgatgattttatagaacttatcaagagcaaggtatatgcctaaa

SEQ ID NO: 319162 - DNA, 419 bp, Unknown
  Bacterial polypeptide expressing nucleotide sequence isolated from the Sargasso Sea
agcaactggaaaatatgcaataccgatcattcaagacttaatcaaaaaaaagttaccattatttggaatctgtttaggtcatcaaatgctcgctttagcgcttggtgctaagacagaaaaaatgagattgggtcataggggagctaatcatcctgtcaaaaatttaattgagggcaaagttgaaattacaagtcaaaatcatggttttgaagtagtaaaaaaaggtttgccaaaaaatataagagttacccatcagtctttatttgacaacagtattgagggtattgaattaaaaaataaacctgtattctcagtccaatatcatccggagtccaaccctggaccacaagatagtgtttatttatttgataaatttgtaaagagtatgaaaaaaaatgccaaaaagaaaagatattaaa

SEQ ID NO: 319163 - DNA, 687 bp, Unknown
  Bacterial polypeptide expressing nucleotide sequence isolated from the Sargasso Sea
gattggcatcgcgggtttagacaccagacatctaacgcggcgtatccgaagggatggaccgccaactggttccatatgcttcgcgcctgacggaaatattgatgttgaagatctaaaggccaagtctgccaattggccgggtctcgaagggatggacctcgcggctgaggtgtcatgccggcgcccctacgattggactgagagtttatggtcgcctggtaaaggcggcaaagaccagcctgagaacaaataccatgttgttgcgattgattatggagctaaacataatattcttcgctgcttagctgcagctggatgcagaatttcagttgttccatctgattacagcgccaaagaaattctcgcactaaagccagatgggatctttctatcgaacggtcccggagaccccgccgctacaggcaagtatgcagtcccgataattcgcgaacttttaaaggctgaaaaaccaatttttggcatctgccttggtcaccagcttttggctcttactttgggtgcggggacccaaaagatgaagcttggacatcggggcgccaatcaccccgttaaagacctagagaccggcaggatagagattaccagtcaaaatcacggtttcgttgtcaaacgtaatagcctgccgttgggcgttagtgaaactcacagttcattgtttgatgggtc

SEQ ID NO: 319164 - DNA, 895 bp, Unknown
  Bacterial polypeptide expressing nucleotide sequence isolated from the Sargasso Sea
gctttaggtaccgctgttggagaaatagtttttaatacaggaatgacgggttatcaggaagttattactgatccaagttattatggacagatactaactttcacttatccagaaattgggaatactggtattaatcatgaagactcagaatccagtatttgtgttaaaggaataattgttagaaattattcatccaataatagtaattggagatcacttaaagattttaatcaatggttagttgaaaaaaatataattggcctttttggaatagatactagagcccttgttaaaatcttgagatcaaatgggtcaatgaatggtgttcttacctcagaagataaaactatagaaagttgtttaaagataatctatggtgccccaaaaatggaagggttaaatttatcaaaaaaagtttccacaaaacaagaatatttatggcaaaatccaacagaaacagattttgacgttagaaaaagacattcagaaaagcaaactaaattaaaaacagtggctattgattttggaataaaaaaatcgattttaaataggttagtctcccatggttgtgatattttagttttaccttcgcaatcttcttttaaagacgttctatctaagaatccagatggaatattcttttcaaacggaccgggcgatccttcttctgtgactgaagggataaatttagcaagatcacttattgaatatggtgaaatacctatgtttggaatttgccttggccatcaaatctttgggttagctttaggcggttcaacttataaacttccttttggacatcgaggtctaaatcatccctgtggaaagaataatcaaattgaaataacaagtcagaatcatggttttgctattaatcctaattctcttccaaagg

SEQ ID NO: 319165 - DNA, 889 bp, Unknown
  Bacterial polypeptide expressing nucleotide sequence isolated from the Sargasso Sea
atcgggaattatggaaccaatcctgatgatatggaatcttccactatccatgcttctgctctggtggtgacccaactcactcagattccgagtaactggcgttccaataaatccctctctgattttctctgggaatccaaggtgccggtgatggaaggagtggatacccgtgcgctggttcgtgttttacgatccgacggagaagtcaaagggctgatggttccttcagactcgttgtacacccttgatcttttgcgggaagaagcgattgcgctgccttccatggaaggaagaaacctggccagagtggtttcgaccaaggaaccttatttctggcctgcggaaacggagggtgttccacttaaagtcgtggcttacgatttcggcatcaaacgtaacattctgcggttgatggctgcattgggaatcaacatcaccatcgtcccctgggacatgcccgcggaagtcgttcgacagatgaatccggatggtgtttttctttccaacggccccggtgatcctgccgcagtggaaagtgccattgaagaagtccgtagcctgcttggggttttcccgattttcgggatctgcctcgggcatcagattttggctttggccctgaactgcaaaacctacaaactcaaatgtggacatcatggagggaaccatcctgtaatggattaccagaccaacaagattgagatcacgagccataatcatggattctctgtggacgaggacagtcttccggaagacgtcagagtgacccacaggaatcttaacgatcagacggttgaaggtctggaatcgcttcagtaccccgcttattccgttcaataccatcccgaggcggcaccaggcccgcgggatgcccgtttctctcaaacgg

SEQ ID NO: 319166 - DNA, 490 bp, Unknown
  Bacterial polypeptide expressing nucleotide sequence isolated from the Sargasso Sea
atgatcagagtcggtgtaactaccctcaaggtttccaccgttcaacaaattgaatcgaaaaggagttttggtgtgacacaagcagcccttgcactcgaagatggaacattttttttgggtgaggcttttggtcatcgaggcacagtaactggagaagtctgtttcaatacatcgatgactgggtatcaggaaattcttactgacccaagctatcgaggacagattctcaccatgactgctccacagatcggcaactacgggatcaattctcaagatatagaaagtggtcaccttcagatggctgggtttgcggtcagagaagctagccgaatggcaagtaactttacggcaaccggtacgcttgctgattatttaaaggccgcaggtgtcgtaggcataagtggaatcgatacacgagctcttgttcgccacatccgaactcagggagcaatgaatggtgttgtttcaagtgaaattcttgaggaagaaa

SEQ ID NO: 319167 - DNA, 901 bp, Unknown
  Bacterial polypeptide expressing nucleotide sequence isolated from the Sargasso Sea
ccttcttatgctgaacaaattattaatttcacttttcctcatgtgggtaatgttgggtcgaacaaagaagatcatgaatcagataaaatttggactaaaggtgtgataataaatactgaaattacagacccatctaattacagatctcttaaacatttagatcaatggcttaaacaaaataaaatagttgggataacaggtattgatactagaaatttaacaaatcttataagagacaaaggagctcctaaaggaactatatcttttttaagaaataaaaaatttaatattaaaaaactcctaacaaccactcaaaaatggagtggtttaaaaaatttagatttagcggaaaaagttacaaccaaaaaaaactatgtttggaaagatttcaaaacttggaaaaaaggagatggttttgttaaaaataaaaaaaaatctttacatgttgttgctattgattatggaattaaaaaaaatattttaagatatttttcaaactttaattgtaaagtaacaatagtttcatgcaaaacaagtgcgagtgatattttaaaattgaatccaaatggagtatttttatcaaatggtccaggtgatccagctgctactggaaagtatgctattccaattataaaaaaatttataaataataatctacctgtatttggaatttgtttaggtcaccaattacttgggctagctttaggtgcaaaaacaaaaaagatgaatttaggacatagaggagctaatcaccctgttaaaaatttaactaaaggtaacgtagagataacgagtcaaaatcatggatttgaaatagtaaagaaaagtttgcctaaaaatattcaaattacacatcaatctctttttgataatagtatagaaggaataaaacttaaatcta

SEQ ID NO: 319168 - DNA, 944 bp, Unknown
  Bacterial polypeptide expressing nucleotide sequence isolated from the Sargasso Sea
atctgaaaaagtctggactagaggtgtgattttcaattcagaaataactaatccctcaaactatagatcattaatagagttagatttgtggcttaaaaaaaataaaattgttggtttaactggtttagacaccagaagcttaacaaattttataagagataaaggagcgccaagaggaactatttctcataaaaaaaaaggcgttttcccactaaaaaaacttatcaatacaactcttaaatggccgggactgaagggtctggatttagcaaaaacagtgtctactaaaaataaattttcatggaaagggcttaagacatggacaaaagaagatggttttaaaaagattaaaaaaaagaaatttagagtagttgcaattgattatggaattaaaacaaacattttaaggtatttttcaaatttttattgtgatgtaatagttgtgccgtgtgatgcttcagctgaatatatcatgacacttaaaccaagtggaatttttttgtcaaatggccctggtgatcctgcggcgacaggcaaatatgcaattaaaattataaaaaatcttataaaaaaaggtttaccaatttttggaatttgtcttggacatcaattattagctcttgctctaggtggtaaaacaaaaaaaatgaagcttggacataggggcgcgaaccatcctgtcaaaaacataaaagataataaagttgaaataaccagtcaaaatcatggatttgaagttaccaaaaataatttgccgtctaaaatcgaaattactcataaatcattatttgacaacagtattgaaggcatcaagttaaaaaataaaccagttttttcagtacagtatcaccctgaatcaaatccaggtcctcaagacagtcattatctatttaataactttattatggaagtaaaaaaatatgccaaaaagaaaagacattaaa

SEQ ID NO: 319169 - DNA, 298 bp, Unknown
  Bacterial polypeptide expressing nucleotide sequence isolated from the Sargasso Sea
aatgaaattaggtcatagaggcgcaaatcacccagtaaaaaatttaattaatagcaaagttgagattacaagccaaaatcatggatttgaagttgttaaagaaagtttgccaaaaaatgttcaaatgacacataaatctttatttgacaattctgttgaaggaataaaattaaaaaataaacctgttttttctgttcaatatcacccagaatcaaatcctggcccacaagatagtcattatttatttaaccaatttattaacgaaataaaaaaaaatgccaaaaagaaaagatattaa

SEQ ID NO: 319170 - DNA, 490 bp, Unknown
  Bacterial polypeptide expressing nucleotide sequence isolated from the Sargasso Sea
tgttttagttccagctaaaacttccgtagataagattctttcttatagtcctaatggtatttttctttcgaacggtccaggtgatccgaaggcaacaggaaaatacgctattccaattataaaaaaactaattaaatcagggataccattatttggaatatgtcttggtcatcaacttatttctctagcattaggggcaaagacaaaaaaaatgtttcaaggtcacagaggggctaatcatcccgtaaaaaatcttgaaacagaaaaagtagaaatcacatctcaaaatcatggttttgaggtaactgaaaaatctattccaaaagatgtaaaaataactcataaatcattattcgatggaagtgttgaaggtataagaaaaggaagaaatatatttgcagttcaatatcatccagaagcaagccctggaccacacgatagtcattatctttttcaagaatttaaaaaaatgattaaacaaaatgcctaa

SEQ ID NO: 319171 - DNA, 229 bp, Unknown
  Bacterial polypeptide expressing nucleotide sequence isolated from the Sargasso Sea
catggttttgttgtaactgaagaatctttgcctaaatcgattaaactaacacataaatctttatttgatggaactgtagaaggaattgaacataaaaagaaaaatatttttgctgttcaatatcatcctgaagccagcccaggaccacatgatagtcactacctatttaagaagtttattcaaatgattaacaaaaataaaaaaaatgccaaaaagaaaagatattaaa

SEQ ID NO: 319172 - DNA, 715 bp, Unknown
  Bacterial polypeptide expressing nucleotide sequence isolated from the Sargasso Sea
ctccaccattaaatggagtggattaaaaaatcttgatcttgcagaaactgtgacaacttcaaaaaactatatttggaaaggtcttaaaacttggaagaaaggaataggatataagaagaatacaaaaaattcttttcatatagtggcaatcgattatggaattaaaaagaatattttaagatatttttcagactttaaatgtaaagtaactgttgtttcatgtaaaacctctgctaaaaaaatattagatcttaagccacatggagtatttttatctaatggtcccggtgatcctgcagcaacaggtaagtatgcaatagaaatacttaataaattaattaaaaaaaatttaccaatatttggtatttgtttaggtcatcaaattttagcattagctttaggtggaaaaacaaaaaaaatgaagttaggacatagaggtgcaaaccatcctgtaaaaaatttagtgcgtgataaagttgaaatcaccagtcaaaatcatggttttgtagttgtagaagaaactttgccaaaaaaaattgaagtaactcataaatctctttttgataataccattgaaggaataagactcaaaaatagaccaatattttcagtacaatatcatccagagtcaaaccctggaccacaggatagtgtctacttatttcaagaatttattaacaacataaaaaaaaatgccaaaaagaagagatattaa

SEQ ID NO: 319173 - DNA, 724 bp, Unknown
  Bacterial polypeptide expressing nucleotide sequence isolated from the Sargasso Sea
gaaagtttagatgctctaaaaaaagaaattaaaaattggtcaggattagaaaatttagatcttgcaaaagtggtttcaacaaaaacaaattataattggaataaaaaaagttggttcaatgaaaataagaatataaataaaaacaaatttaatgtcacttgtctagactttggaataaaacataatattttgagaaacttgtatgaaattaatttaaatccaacagttttaaacttatcaagtagttatgaagatatattagaaacaaatccagatggtatttttttatcaaatgggccaggtgatccttatgctacaggtgaaaaaataattgatacccttaaaagattaattgatattgaaatacctatatttggaatttgtctaggtcatcaaatcttaagtcttgctttaaatgcaaaaacaaaaaaaatgtttcaaggccatagaggatctaaccatccggttaaaaatttaacaaaaaatattgttgaaattacatcacaaaatcatggatttgaggtcgacagaaatactttttcaaaagatgttattgaaacacacatttccctatttgatggaacaaatgaaggaattaaacataaaaatttaccagtttttagtgttcaatatcatcctgaagcttcgccaggtccgcatgatagtcattacttatttttagaattttataatctcataaacaaatatgccaaaaagaactgac

SEQ ID NO: 319174 - DNA, 313 bp, Unknown
  Bacterial polypeptide expressing nucleotide sequence isolated from the Sargasso Sea
gggcctggccctgggagggcgcaccttcaagctcggcttcggtcaccgcggtttgaatcatccctgcggcaccagcggacaggtggagatcaccagccagaaccatggctttgccctgtcctccgaggcattgccggagacgatggtcgaggtgacccacctcaatctcaatgaccgcaccgttgccgcgtttcaacatcgccatcaaccggtgtttgggatccagtaccacccggaggccagcccgggtccccacgatgccgatcatcacttcggccgtttcgttgcgttgatggcggatcggcgtggctga

SEQ ID NO: 319175 - DNA, 739 bp, Unknown
  Bacterial polypeptide expressing nucleotide sequence isolated from the Sargasso Sea
tggttagaaaatgtaggactaactggcataactggtgtagatacgagaaatttgacccgtcgcatacggaagtttggtgctgctaatgggattatttctttctctaccagaaaagagttcgatatcgatagactcaggctcagagctaatcaacatcccagcttatccggcaaagatttagcttcagttgtgtcgcccaaagaactgactgaatggtcaattggaacatggacctttggttccaaagtaactggggatgggtttaaccatgcagttcagaaagattatcatattgtagcgatagactacggtgctaaacggaacatattaagaaacctagcacaattgggagctaaggttacaatagtaccctctaatatggatgcagatactatcctcaaacttcgacctgatggtgtttttttatctaatggacctggtgatcctgctgccactggcgagtatgccgtgcaaataatcaaaggtttattggatagcaacactccaatctttggcatttgcttaggccatcaattgctttcattggcacttggcgccaaaacagaaaaaatgaagaatgggcatcgtggtggcaatcaccccgtaaaacaaattgaaactgggaagatagaaatcacgagccaaaatcatggtttcgttatatcggagaacactttgccatcatcaaccaccatcacccatcgatctttgttcgatggatccattgagggctttaaaa

SEQ ID NO: 319176 - DNA, 685 bp, Unknown
  Bacterial polypeptide expressing nucleotide sequence isolated from the Sargasso Sea
atggatcttgccaaagacgtatcaactagaaaaaattatacttggaaaggtcttaagacttggagcaaagaggaagggtataaaaaaaataataaaaaaaaatacagagttattgcaatagattatgggattaagaaaaatattttgagatatttttctaactttgactgtgaggtaaaagttgtatcttgtaaagaaaatcctgataacttgctaaaacttaaacctcatggaatatttttatctaatggccctggtgatcctgctgctacaggtgaatatgcaattcctacagttcaaaaattaataaaatcaaatttacctgtatttggaatttgtttgggccatcaaattcttgcacttgcattaaatgcaaaaacaaaaaaaatgaaattaggacatagaggtgcaaatcatcctgttaaaaatttaatttcaaaaaaagtcgaaatcacgagtcaaaaccatggttttgaagttgttaaagaaagcttgccaaaaaatgttgaaattacacataaatcactttttgataattcaattgaaggaattaaattaaaaaataaaccagttttttctgttcaatatcacccagagtcaaaccctggcccacaagatagtcactacctatttaacgaatttataaatgaaataaaaaagtatgccaaaaagaaaagatattaaa

SEQ ID NO: 319177 - DNA, 594 bp, Unknown
  Bacterial polypeptide expressing nucleotide sequence isolated from the Sargasso Sea
cttactattttggtgatgaaaattctaaatataagatagctgtacttgatttaggagtaaaaatgaatattcttaaaaatctttcaaaaagaaatgcttacatgaaagtttttccacacaattctaaatatgaggatatgaagaaatggaatcctgatgcatatttcatctcaaatggaccaggtgatccagaaccattatctaatgcaattaatgttactaaggaaatactaaactctaaaaagcctctttttggtatatgtttaggtcatcaagttatagctctagcaaatggaataaagacatataagatgcataatggacataggggtataaatcacccagttatcaatttaaagactggtaaaggtgaaattacttctcaaaatcatggttttgcaattgataaagaggacacagaaaaaaataaaaatattgaaattactcacatgcatctgaatgatgataccattgctggaattaagattaatgataagcaatgtttttctgttcaatttcaccctgaagcaagtgcaggacctcatgattcttcatacttatttgatgaatttattgacatgatagaaaagtaat

SEQ ID NO: 319178 - DNA, 880 bp, Unknown
  Bacterial polypeptide expressing nucleotide sequence isolated from the Sargasso Sea
agggcatttttgcatttagatgcttggctcaaaaaaaataaaatagttggaattacaggattagatacaagaagtttaacaaactttattagagataaaggtgctcctaaaggtacaatttcttactccaaaaacggaaaatttaatgttagcaaattaataaacacaaccataaaatggagtggtttaaaaaatcttgatcttgcaaaaactgtatcaacttcaaaaaattatatttggaaaggccttaaaacttggaataaaaaaacaggatacaaaaagaatacaaaaaattcctttcatgttgttgcaattgattatggaatcaaaaaaaatattttaagatatttttcagattttaaatgtaaagtaactgttgtttcttgtaaaacttctgcggaaaaaatattagatcttaaacctaatggaatatttttatcgaatggtcctggtgatccagcagcaacaggaaaatatgctattgagatacttaataaattaattgaaaaaaatttacccatatttggtatttgtttaggtcatcaaattttagcattggccttgggtggaaaaacaaaaaaaatgaagttgggacatagaggtgctaaccatcctgttaaaaatttgattcataataaagttgaaatcacaagtcaaaatcatggttttgtagtagttgaagaaactttaccaaaaaaaattgaagtaactcataaatctctttttgacagtactattgaaggaattagacttaaaaacaaaccaatattttcagtgcaatatcacccagagtcaagtcctggaccacaggatagtgtctacttattcaaagaatttataaacaatttaaaaaaaaatgccaaaaagaaaagatattaaa

SEQ ID NO: 319179 - DNA, 647 bp, Unknown
  Bacterial polypeptide expressing nucleotide sequence isolated from the Sargasso Sea
cacttggaaaggtttaaaaacctggaaaaaaggaaagggatacttaagaaacaaaaataaaaaacttaaaatagttgcaatagattatggaattaaaaaaaatattttaagatatttctctgattatgactgtgaagtaaaagttgtttcttgtaaaaaaccagctgaagatattttaaagttaaagccacaaggtatttttttatcaaatgggcctggcgatcctgcagcaacaggaacctacgcaattcaaaccgttaaaactttaataaaaaataatcttccaatatttggaatatgcttaggtcatcaaattttagctttatctttaaatgccaaaacaaaaaaaatgaaacttggtcatagaggggcaaatcatccggtaaagaatctaattaatagcaaggtagaaataacaagtcaaaatcatggatttgaagttattgaaaatagcttatcaaaaaatattcaaataactcataagtcactatttgatggaagtattgaaggaataaaattaaaaaataaaccaattttttctgtccagtatcatccagaagcaaacccgggaccacaagatagtaattatttgtttagtgattttataaaagaagtaaaaaaatatgccaaaaagaagagacattaaa

SEQ ID NO: 319180 - DNA, 478 bp, Unknown
  Bacterial polypeptide expressing nucleotide sequence isolated from the Sargasso Sea
gatgattaatccatataagaaaaacgcaaaattagttttaagtaatcgaattgtattccctggattttattttggtgcttatggtacagcaattggtgaaatagtctttaatacaggaatgactgggtatcaagaagttattactgatccaagttattacggacagatattgacatttacttatccagagattgggaatactggtattaattttgaagattccgaatctaatactaatgttaaaggaataatcgtaagaaatttttcatctaataacagcaattggagatctaaaaagaatttcgatcaatggttagttgaaaaaaatataataggtctccatggaattgatacgagagctcttgtcaaaattttaagatctaatggctctatgaatggagttattacttctgaagataaaaatttagagagttgtttaaagatgattcatgatacgcccaaagatggagggggaatt

SEQ ID NO: 319181 - DNA, 727 bp, Unknown
  Bacterial polypeptide expressing nucleotide sequence isolated from the Sargasso Sea
atggggcagaagacgcactgtggcccgaattttgctgcgcttcgcgccgctcgggagaatccaacggcagtcctcgttctagctgatggaacggttttttcaggtgttgggtttggcgccgctacgacaaatgtcggtgaagtctgcttcaacacctcgatgactggctatcaggaaatcttgactgacccgtcctatgccgggcagatcattaccttcacctttccgcatatcggcaatgtcggcgccaactccaaggattttgagacgaacaggccagccgcactcggcatgatcacgcgccagccggtgaccgcgccggcaagctggcgcgccgagaccaatcttggtgattggctggcgacaaacaatatgcccggcattgccggcatcgacacccgcgcgctcacgcgtcgcatccgcgacgctggcgccccgcatggcgtgctgtgccatgcgtctgacggcaatatagatatcgacgcgctgatcaacctcgccgccgcctggccgggcctgaccggcttggatctggcaaccgaggtcacggccgatgcaatgcatgactggaatgagggaagctgggagatggccacagccgcgcaccggcagaccgacgccgcttttttggtggtagccatggattttggctgcaagcagaatatcctgcgctgcctgaccgacgccggttgcaaagtaagggtggtgccggccgataccagtgcca

SEQ ID NO: 319182 - DNA, 886 bp, Unknown
  Bacterial polypeptide expressing nucleotide sequence isolated from the Sargasso Sea
tataacagacaaataattacttttacaaatcctcatattggtaacactggcaccaatgatgatgattttgaatctagacgcgcatatgcttcaggaattattattagagatgaggagatattgcctaataattggaggcagactagcgatctgaaagattttctaaaagaccaaaatattataggtatttctggtattgatactaggaagctcactaggattttgcgaacaaagggttctcaaaatggttgtataataactggggatcattctttagatgatgctaagcaaaaacttcgagagtttcagggacttgagggcgcagatctggcaattcaggtaacaacaaaaaaagaatatgactgggacaagggattaatagatatatatcaaaatacagattcaaaaaattcaggtataaaatatgatgtcatagcttatgactatggtataaaaaacaacatactaagaatcttatctgacaaaggttgtaaaattaaagttgtgccagcagattatcccgctaaaaaagttttagagtcaaaaccggatggagtttttttatcaaatggtccaggtgatccgaaagcatgtatttatgcaattaaaaatataaaagaacttttgaaacataaaattcctatgtttggaatatgtttaggtttccaattattagccttggcctctgatgcatcaacaactaagatgaagttcggccatcatggcgcaaaccatccagtgatggatctttcaagcaagaaagtatttataacaagtcaaaatcatggatttatggttgatggtgaaaatctccctgagaatataatcaaaacacacatatctttatttgatggctcactacaaggatttgaggttaaggactatt

SEQ ID NO: 319183 - DNA, 880 bp, Unknown
  Bacterial polypeptide expressing nucleotide sequence isolated from the Sargasso Sea
ttgtttaatacttcccaaacaggctatcaagaagcattatccgatccctcatatacaaaacaaatcattacatttacttttccacatgttggaattgtaggtacaaatcaagaagatcaagagtcaaaaaaaatttatgctgatggttgtgtaataaatcagccattatcagaatattcaaattggagagcagaaaataacttaaattcatattttttaaaaaacaaaattccatgtatttttggaattgacactagatacttaactaagaaattatctgttgagggagctaagaaggcagctattattcactttggagaagatgaaaataaaattgaaaaacttaaaacccaaataaatgaatggaaaggtcttcaaaatttagatttagctggaatagtatcaacagagcaaaactataattggaaaaaaggaatatggaaaagtgataaatcgattaaaggccaatttaaatataatgtcacctgtttagactttggaattaaaaataatattttaagaaatctaaatgaatataatcttaacccaactgtattaaacttattttctagctacgaagaaataatagaaactaatccttcaggaatttttttatcaaacggtcctggtgatccttatgccacagggagtaaaatagttgatgtgatcaaaaaattaattgatgataatattccaatatttggaatatgtttagggcatcaaattttaggattggcattaaatgcaaacacaaaaaaaatgtttcaggggcacagaggttcaaaccatcccgtcaaaaatcttacaacaggcattgttgaaattacttcacaaaatcatggttttgaagttgatagagatagtttggcaaagatataat

SEQ ID NO: 319184 - DNA, 691 bp, Unknown
  Bacterial polypeptide expressing nucleotide sequence isolated from the Sargasso Sea
tggtattatatcttctaaaactgataacatagatgagttagaaagtaaattgagtgatgcaccttcaatggaaggattagatttagctaaaattgtttcaacaaagaatatctatcagtggtctgaaaaagggaagtacaaggttgctgcgatagactttggtataaaaaaaaatattttgagattgctggaaagttttgattgcagtgtgacggtctttcccgcagaaactaatgcatttgagatcttatcttatgatccagatggagtttttctttcaaatggtcctggagatcctgcagctgttggatatggtatagatacaataaagaaactcttaggcgttaaaccaatatttggtatttgtttggggcatcaattactagctcttgcgctaggggcaaaaacattcaaactaaaatttggacatcgtggtataaatcatcctgttaagaatatgaacctggggacaattgaaatcaccagtcaaaatcatggctttgcagttgaccttgatagtttaccaaaaaatattttgtctactcatattaatctaaatgataatacttctgctgggattgagtccattgaatatcctgctttttcggttcaatatcatccagaatcaagcccaggcccgcatgatagtcgttatctattcaaaaaatttattggaatgatggatgcctaa

SEQ ID NO: 319185 - DNA, 625 bp, Unknown
  Bacterial polypeptide expressing nucleotide sequence isolated from the Sargasso Sea
atgactggccaagatttagcaaaatttgtttctaccaggaagatgtataaattttctgaacaaggtaaatataaagtagcagttcttgattttggagttaagagaaatatattaaatattttaaaaaagcttgactgtcgagtttctgtttttcccgcaaatactagcgctaaagaaattctagagattagccctgatggcatttttttatctaatgggccaggggaccctgctgctgtcacttatgcaattacaactgtaaaacaaatcctaggaaagaagccaatgtttggtatttgtcttggccatcagattttagcactttctcttggtgcaaaaacctttaagttgaaatttggacatcgggggataaatcatcctgtgaaaaacttaattacaaatgcggttgagattacgagtcagaatcatggatttgctgtggatagtaaaagtctaccagacaatactaaagaaacacatgttaacctaaatgataatacaaatgctggtattgaaagtattgataattttgctttttctgttcaataccacccagagtccagtccagggccacatgacagtaggtatttgtttcaaaaatttattgagatgatgaatgcctaaa

SEQ ID NO: 319186 - DNA, 451 bp, Unknown
  Bacterial polypeptide expressing nucleotide sequence isolated from the Sargasso Sea
atttcgaacggaccaggtgacccaagatcattgcttacagtaatagataccgttcaaaaccttataggaaaacttccaatatttggaatttgtcttggtcatcaaatacttgctttggcttgtggtcttaaagttaaaaaaatgcaatttggtcatcatggttcaaatcacccagttgaaatagaaggaataaaaaaagcactaataaccgcacagaaccatggtttttctattgaggagtttgaagatgggtttgagcatgaaaattttggaaacattagtgtctttgcaaggaatttaaatgatggaacaaatgaaggaattagtctttgggattccatggcgtactcagttcaatttcatccagaatcaggacctggtacaactgatggattacaaatttttaatcctttttttgaaatgattgagaataactatgccaaaaaataaa

SEQ ID NO: 319187 - DNA, 700 bp, Unknown
  Bacterial polypeptide expressing nucleotide sequence isolated from the Sargasso Sea
gagtggattaaaaaatcttgatcttgcagaagtagtttcaactcagaaaaattatacttggaaaggtcttaaaacctggaaaaaagaagccggatataaaaaaaataataagaactcatttcatattgttgcaattgattatggaataaaaaaaaatatcttaagatatttctctgactttaattgtaaagttactgttgtttcttgtaaaactaatgcacaaaaaattttagctttaaaaccaaatggaatattcttatcaaatggtcctggtgatccagctgcaacagggaaatatgctatagaaattattaatgatctaattaaacataatttacctatatttggtatttgtttaggtcatcagattttggcattagctttaggtggtaaaacaaaaaaaatgaagttaggacatagaggtgcaaaccatcctgttaaaaatttagttcatgacaaggttgagattaccagtcaaaatcatgggtttgtagtagttgaagaaactttaccaaaaaaaattgaagtaactcataggtctctttttgataatactattgaaggaataaagcttaaaaataaaccaatattttcagttcaatatcatccggaatctaatcctggaccccaagatagtgtttatttgtttcaagaatttattaacaacatgaaaaaaaatgccaaaaagaaaagatattaa

SEQ ID NO: 319188 - DNA, 844 bp, Unknown
  Bacterial polypeptide expressing nucleotide sequence isolated from the Sargasso Sea
gtaaaaaagaataaaattgttggaataactggaattgatactagaaatttaacaaattttattagagataaaggcgccccaaaggggacaatttccttttacgataaaaataaattaaatataaaaaaactctttaaaatcacaaataaatggagtggtcttaaaaacttagatttagcaaaacaagttaccactagtaagaattatttgtggcaagattataaaacatggaaaaaagaaaatggatatttaaaaaataaaaaaaaattattacatgtagtagcaatagactatggaattaagaaaaatattttaagatatttttcagattttaattgtaaagttacagtagtaccatgtaaaacaagtgcaaaagatattattagactaaaccctaatgggatatttttgtcaaacggacctggtgaccctgccgcaactggaaaatatgctattcctataattcaagatttaatccaaaaaaagttaccattatttggaatttgtttaggccaccaaatgcttgctttagcgcttggtgctaagacagaaaaaatgaaattaggccatagaggcgctaaccatcctgttaaaaatttaattgaaggaaatgttgaaattacaagtcagaatcacggatttgaagtagtcaaaaaaggcttacccaaaaatataagagttacacaccagtctttatttgacaatagtattgagggtattgaattaaagaataaacctgttttctcagttcaatatcatcctgagtctaaccctggtcctcaagatagcgtttatttatttgataaatttgtaaaaagtatgaaaaaaaatgccaaaaagaaaa

SEQ ID NO: 319189 - DNA, 626 bp, Unknown
  Bacterial polypeptide expressing nucleotide sequence isolated from the Sargasso Sea
tgccagagtggtttcgaccaaggaaccttatttctggccttcagaaacggagggtgttcccttgaaagtcgttgcatacgatttcggtatcaaacgtaacattctgcggttgatggcagcattgggaatcaacatcaccatcgtaccctgggacactcctgctgaagtcgttcgacagatgaatccggatggtgtttttctttccaacggccccggtgatcccgccgcagtggaaagtgccattgaagaagtccgcagcctgcttggggttttcccgattttcgggatctgccttgggcatcagatcctggccttggcattgaactgcaaaacctacaaactcaaatgcggacatcatggaggaaaccatcctgtaaaggattaccagaccaacaagattgagatcacaagccataaccatggattctctgtggacgaagagagtcttctagaagacgtcagagtgacccacaggaatcttaacgatcaaacggttgaaggtctggaatcacttcagtaccccgcctattccgttcaataccaccccgaggcggcacctggcccgagggatgcccgctatctcttcaaacgatttgttgagatgatgggtagcaccaagcgttgaa

SEQ ID NO: 319190 - DNA, 699 bp, Unknown
  Bacterial polypeptide expressing nucleotide sequence isolated from the Sargasso Sea
gtggcctcaaaaacttagacttagcaaaacatgtcaccacgaagaaaagttatttgtggcaagattataaaacctggaaaaaagaaagtggatatttaaaaaataaaaaaaagttgctacatgtagttgcgatagactatggaatcaaaaaaaatattttaagatatttttcagattttaattgtaaagttacaattgtaccatgtaaaactacctcaaaagatattctaaaactgaatcctaatgggatattcttatcaaacgggcctggagatcctgctgctactggaaaatacgctataccgataattcaagacttaatcaaaaaaaaattaccattatttggaatctgtttaggccaccaaatgcttgcgttagcgcttggtgctaagacagaaaaaatgaaattaggccatagaggcgctaaccatcctgtcaaaaatttaattgaaggtaatgttgaaataactagtcagaatcatgggtttgaagtggtaaaaaaaggtttgcctaaaaatataagagttactcaccagtctttatttgacaaaagtattgaaggtattgaattaaaaaataaacctgttttctcggttcaatatcatccagagtctaaccctggtccacaagatagtatttatttatttgataaatttgtaaagagtatgaaaaaaaatgccaaaaagaaaagatattaaa

SEQ ID NO: 319191 - DNA, 816 bp, Unknown
  Bacterial polypeptide expressing nucleotide sequence isolated from the Sargasso Sea
taaaattgttggactaactggtttagatacaagaagcctgacaaactttattagagatcaaggtgctccaaaaggcactatttcaaataataaaaaagggaaattcaatattaaaaaattaactaatatgtcagttaaatggtctggcttaaatggattagatctagcaaaagaagtatcaacaaaaaaaaactatatatggaaaggttttaaaacatggaaaaaagaagttgggtacaaaaaaaataccaaaataaaatttaagattgtagcaattgattatgggataaagaaaaatattttaagatatttttctgattatagctgtgaggttaaagtagtatcttgtaaatcaaccgctggtgaaattgtgaaattaaaaccagatggtatttttttatcaaatggacctggcgatccagctgcaacaggaagatatgcgattaaaactgttcaaaaattaatcaaattaaattttcctatatttggaatttgtcttggtcatcaaatattagctttagctttaaatgctaaaactaaaaaaatgaaattaggtcatagaggtgccaatcatccagttaaaaatttaattaataattcagttgagattacaagtcaaaatcatggttttgtagttgtagaaaaaagcctttctaaaaaaattcaaattactcacaagtcactttttgatgatactattgaagggataaaattaaaaaataaacctatcttttctgttcagtatcatcctgaggcaaatcctggcccacaagatagtcagtatttattcaataactttatacaaaatgtaaaaaa

SEQ ID NO: 319192 - DNA, 709 bp, Unknown
  Bacterial polypeptide expressing nucleotide sequence isolated from the Sargasso Sea
gatggcatggccaggattaaatggcatggatcttgctaaagaagtttcaactaaaaaaaattataattggaaagggttaaagacctggagcaaagaagaaggttataaaaaaaataataaaaaaaaatatagagttattgcaattgattatggaattaaaaaaaatatcttgaggcatttttctaattttggttgcgaagtaaaagttgtttcttgtaaagagagtgctgaaaatttaattaagtttaaacctcatggaatatttttgtcaaatgggcctggggatccagctgcaactggtaaatattcaattcctatagttcaaaatttaattaaatctggtttaccagtttttggaatttgtttaggtcatcaaattcttgcgctcgcattaaatgcgaagactaaaaaaatgaagttaggacatagaggcgcaaatcatcctgtgaaaaatttaatttcaaataaagtggaaatcactagtcagaatcatggttttgaagtcgtgaaggaaagtttgccaagaaatgttgaaataacacataagtccctttttgacaattctattgagggaattagattaaaaaataaacctgttttttctgttcaatatcacccagagtcaaaccctggcccacaagatagtcactatttattcagtgattttatttatgaaataaaaaaatatgccaaaaagaaaagatattaa

SEQ ID NO: 319193 - DNA, 606 bp, Unknown
  Bacterial polypeptide expressing nucleotide sequence isolated from the Sargasso Sea
gcagatggatgtggccagggaaattcaaccgtacccctacaaataaacgaatcatagccattgattttgggataaaaactaatattctgcgttgtcttgcagaatctggatgtggcatcaaaattgtgccggcaactgtaacctatgacgaactattggaactaaacccggatggtatttttttgtcaaatggtcccggagacccagaggcaaccggtgaatacactataccgacactaaaaaaaataattaacaatacccgaatacccatctttggtatctgcttgggccatcagattttggctttagccttaggcggaaaaacacttaaaatgaaatgtggtcatcatggggccaaccacccagtaaaagaccttatgacgggcaaagtagagattacctcaatgaatcatggatttgctgttgatcgttattcacttcctgataatgtgcatgaaactcatgtgtcattatttgataacacaaactgtggaattgaactgaaaggcagaaatgtcttttcagtgcaattccaccctgaagcaagtcctgggcctatggacagtctatacttgttttctaaatttgtagcctcaatggcgtgaa

SEQ ID NO: 319194 - DNA, 649 bp, Unknown
  Bacterial polypeptide expressing nucleotide sequence isolated from the Sargasso Sea
atggcccaacagcctagcccccgcccgaccgcctgtttagcacttgcggacggaacgcttttctttggccatggctttggcgcgacgggcgaaaccaccgccgaattgtgcttcaatacagcgatgaccggctatcaggaaatcatgaccgatccgtcctatgcggggcaaatcgtaaccttcaccttcccgcatatcggcaacaccggcgtgacccccgaagacgacgaaactgccgatccggtggccgcaggcatggtggtgaaatgggatcccacggtggcgtccagctggcgcgcgacgcaagaattgggcgattggctcgccgcgcgcgggcggatcgccattggcggcgttgatacccgccggttgacccgtgcgatccgccaatcgggcgcaccgcatgtggcgctgtcccatgaccccgaaggcaatttcgacgtcgaatccctggttgcagccgcgcgcggctttgccggcctcgaaggggtcgatctggccaaagatgtgacctgcgctcaaagctaccattggaatgaaatgcggtgggcatggcccgatggatatctgccgcagaccgcaccgaaacataaagtcgttgcgatcgactatggtgccaaacgcaacatcctgcgttgtcttgcctcgg

SEQ ID NO: 319195 - DNA, 886 bp, Unknown
  Bacterial polypeptide expressing nucleotide sequence isolated from the Sargasso Sea
caagaaattttcacagatccttcatattttggacagattatggttactacaacttcacatattggtaactatggaataaaaatgtctgagtctcaatctaaagagatatttattagtggtttaatctgtaaatcatttagctcagttaactcaagaacaaattctaaatcattaaaagaatggtttaagtcaaagaatttagttacactgtgtgatgtggataccagagcattagtcagatatataagagataatggggctatgaacgctgcaatcacaactgagactgatataattgacacaatcaaaaaaaaccttgataaattcccaaggatggatggtctagaactcgcctcaaaggtttctacaaaaaaaccttatgaatttggtgacagcaattctcaagctcgactagctgtgatagatcttggaattaaaaaaaatatacttgaaaatttttcaagaagagggttatttataaaagtatttccctatgatactaatattgaagagatgctaaagtttaaacctaatgggttttttctatcaaatggtcctggtgatccaaaaccactaaaacaggtaataaataccacaaagaaaatacttgataaaaattaccccctttttggtatatgtttaggtcatcaagtaattgctcttgcaaatggaattaagacttataaaatgtttaacgggcatagggggattaatcatcctgttctaaatttaaatactggtagaggtgagattacttcacaaaatcatggttttgcagttgactatgatactgcagtttcaaataaatctgtaaaaatatcacataaacatctcaatgatcagactatagcaggtcttgaaattaaaggaaaggattgcttctcag

SEQ ID NO: 319196 - DNA, 137 bp, Unknown
  Bacterial polypeptide expressing nucleotide sequence isolated from the Sargasso Sea
ggatcagttgaaaggtttggagttgttaaataacccggtattttcagttcaataccatcctgaagcatctcctggacctcatgatcatcttggtttatttaaaaaattttataatttagtacaaaaaaatgcctaaa

SEQ ID NO: 319197 - DNA, 598 bp, Unknown
  Bacterial polypeptide expressing nucleotide sequence isolated from the Sargasso Sea
aataaaaaaaaaatttacaaaataattgctattgattatggaattaaaaaaaatattttaaggtatttttccaactttaattgtgaagtggttgttgttccttgcaatcttcaagctgaggaaattattaaattaaaacctgatggtatattcttgtcaaatggtcctggagatcctgcggcaactggaaagtatgcaataaatataatacaaaaattaataaaaaaaaatattccacttttcggtatatgtctcggacatcaattgttggctttggcacttaaggcaaaaacaaaaaaaatgaaacttggtcatagaggtgcaaaccatccggtgaaaaaccttatttataataaagttgaaataacaagccaaaatcatggttttgaaattgttaaagaaagtttaccaaaaaatattgttgttactcataaatctttgtttgataattgtattgaaggtataaaattaaaaaataaaccagttttttcagtacagtaccaccctgagtcaaacccaggtccacaggatagtcactatttatttaatcaatttattaatgaagtaaaaaataatgccaaaaagaaaagatattaaa

SEQ ID NO: 319198 - DNA, 791 bp, Unknown
  Bacterial polypeptide expressing nucleotide sequence isolated from the Sargasso Sea
catgaaaaaagatatttcatctaataaacctacagcttgcctagcattagcagacggaaccttattttttggtaaaggcttcggatcaactggcgaaacaacggctgaactctgctttaatacatcaataacgggatatcaggaaattcttactgatccttcttacgcaagccaaattatcacctttacatttccgcatattggcaatgttggtgtaaacactgaggactctgaaactcaaaatcccgctgccgaaggcttgatcgtcaaatgggaccctacacaaccatctaactggagatcatttgaacatttatcagactggttaggtaaatataatttattggggatgggcggtgttgatactaggcgtttaacgagggctattaggatgttaggggcaccacacgtggctctagcccacaaccctgatggtgtttttgatactgcagaacttataaaaaaagcaaaacatttttctggtttagagggcttagacttggcaaaagaagtcacgtgtcaccaatcctacaaatgggatgaaatgcgttgggcttggccaaagggctatgaaaaacaaaattatgcgaaacataaagttgttgccattgactatggcgctaagcgaaatatccttcgatgtctggcgtctgctggctgtgaagtaatcgttttacctgcttcaagttcagcagatgaggttcttgcacacaaacctgatgggattttcttatctaatggaccaggtgacccagcagctactggaaagtatgctgttcctgtcatccagc

SEQ ID NO: 319199 - DNA, 838 bp, Unknown
  Bacterial polypeptide expressing nucleotide sequence isolated from the Sargasso Sea
aacacttcaattactggttatcaagaaataatttcagacccctcatacgcagaacaaattattaattttacatttccccatgtaggaaatgttggaacaaataatgaggatcatgagtctgataaaatttggacaaaaggagtaattttaaatactgaaattactaatccctcaaattatcgttcattaagacatttagatttgtggttaaaaaaaaataaagttgttggaataactggtattgatactagaaatttaacaaattttattagagataaaggtgctcctaagggaactatatcttttttaaaaaatagtagatttaatataaataaaattcttaaggatacaaaaaaatggagcggtcttaaaaatttagatttagcaaaaaaagtcacaactaaaaaaaattatacttggaatgattttaaaacttggaaaaaaggttcaggttttattaaaaataaaaaaaaatcccttcatgttgtagctatagattatggaataaagaaaaacattttaagatatttttctgactttaattgtaaagtaactattgtttcgtgcaaaacaagtgctaatgatattttaagattaaaacctaacggcatatttttatctaatggcccaggagaccctgcggctaccggaaagtatgcaattccaactataaaaaaattcataaaaattaatctgcctgtatttggaatttgcttgggtcatcaattactaggattatctttgggcgcgaaaacaaaaaaaatgaatttgggtcacagaggcgctaaccatccagttaaaaatttaattaaaggaaatgttgaaataacaagtcaaa

SEQ ID NO: 319200 - DNA, 445 bp, Unknown
  Bacterial polypeptide expressing nucleotide sequence isolated from the Sargasso Sea
ttgtctaatggccctggtgatccagcagcaacaggaaaatatgcaataaaaatactcaatcagttaataaaaaaaaatttacctatctttgggatttgcttgggccaccaaattttagctttagctttaggtggaaaaacaaaaaaaatgaagttgggacatagaggagctaatcatccagtaaaaaatttagtccatgataaagtagaaattaccagtcaaaatcatggttttgtggtagttgaagaaaatttaccaaaaaaaattgaggtcactcacaaatctctttttgataatactattgaaggaataagacttaaaaacaaacccatattttcagtacaatatcatccagaatcaaaccctggtcctcaagatagtgtctatttatttcaggaatttattaacaacatgaaaaaaaatgccaaaaagaaaagatattaaa

SEQ ID NO: 319201 - DNA, 340 bp, Unknown
  Bacterial polypeptide expressing nucleotide sequence isolated from the Sargasso Sea
gatgaaagattcttatgggaccaagcctactgcttgtctcgccctgtctgatggaacaattttttatggtgaaggctttggctcaactggacgtaaaaccgccgaattatgttttaacacatctatgactggatatcaggaaattttgaccgacccttcttatgccggccaaattgtaacttttacttttccacacatcggaaacgtgggggtcaatctagaagataatgaagccaacatgccgttcgcttccgggatggtagtaaaatggcgcccaactttagcttcaaattggagatcacaacaaaacctaattgaatggttagaaaacaataagctt

SEQ ID NO: 319202 - DNA, 652 bp, Unknown
  Bacterial polypeptide expressing nucleotide sequence isolated from the Sargasso Sea
aatgaagtcttcgaacgccatattagtattacaagatggcactactttctctggaaaaagcataggatttcagggggaatcatgtggtgaagttgtatttaatacggcaatgaccggctatcaagaaattctcactgacccatcttattgccagcaaattgttactttaacttatcctcatataggtaataccggaacaaatgttgaagattttgaatcagaaaaagtttggtgctctggattaattattaaagatctaccttctactttaagcagttggcgaaatgaaacaaatttaagtgaatttttaataagtaataaaacagtagccatttctaatattgatactaggaaattagtaaatattattagagagaaaggagcccaaccgggtgcaataatgactggaaaaaatccaagtaaagataaagggtttgatttagcaaatagttttcctggtttatcaggattagatttagctaaagaagtcactactagtagaaattattcttggaaagacggtgtatggagaaaagacagcagatctacaaaatataaagttgtttcattggattttggagtaaagaagaatattttaagaattcttcataatagaggctgtgaaattgaagttgttcctgctaagacaacc

SEQ ID NO: 319203 - DNA, 469 bp, Unknown
  Bacterial polypeptide expressing nucleotide sequence isolated from the Sargasso Sea
tgaagaaataattaaattaaatccaaaaggtatatttttatctaatggtcctggtgacccagagccctgtgattatgcaattgaaagcattaaaaaaatattgcaagaaaaaattccaatctttggaatatgtcttggccatcaattattggcacttgctggtggtgcaaatacttacaaaatgaagtttggtcatcatggtgcgaatcatcctgttcaagatgttttatctaaagatgtttttataacaagtcaaaatcatgggtttgctgtagatgaaaatactttaccgaaaaatataaaaatcacgcatttatctctttttgataaatctcttcaaggtatagaatttactgatacacctgcatttagttttcagggtcatcctgaagctagtcctgggccacaagagattcaaatactttttgaaaaatttagtttaatggttaaagaatatgccaaaacgtaa

SEQ ID NO: 319204 - DNA, 430 bp, Unknown
  Bacterial polypeptide expressing nucleotide sequence isolated from the Sargasso Sea
tcaaatggtcctggagatccagaaccatgtgattatgctataaaatgtatcagagaactgctaaaagcaaacataccaatatttggaatatgtctcggtcatcaattattggctctcgcatcaggtgcaaagacagaaaaaatgaaattcggtcaccatggtgcaaatcatcctgtgatagacactcagacaggcattgtttatatcacgagtcaaaatcatggttttactgtcaatgaaatgacaattccagagaatgttaaagtcacacataagtcattatttgatcaatccatccagggcattgaattgaaagacaagaatgcgtttagtttccaaggtcatcctgaggcaagcccaggacctcatgatattcagcccttatttcaaaaattcatctcgaatataaatcatgccaaaaagaactgat

SEQ ID NO: 319205 - DNA, 156 bp, Unknown
  Bacterial polypeptide expressing nucleotide sequence isolated from the Sargasso Sea
ctcatatatctttattgatgggatcaaatgaaggtataaggcacaaaactttaccggtatttagtgttcaatatcacccagaggcaagtcctggacctcatgatagcaattatctttttagagaattttacaaattaattacaaagtatgcctaaa

SEQ ID NO: 319206 - DNA, 728 bp, Unknown
  Bacterial polypeptide expressing nucleotide sequence isolated from the Sargasso Sea
ttgcatatgtcctggagaccaaaaatcttttcccttagcaaaggaagcattagacagctttaatggactggagggcctagatttagctaaggaggtttcaactgatcaatcttatacttgggaagagggtacttggccaaactatcaagatgtcaaagatgacaagttaattgttgcagtagattttggagtaaagaaaaatattctaaggcttctcagaaagcatgttggcaaagtgaaagtagtaaatgctcaaatagattttgaggaattaattatgcttaaacctgatggagtttttttatctaatggtccaggtgaccctgaaccgtgcttatatgcagttgaattaatcaaacaacttctaaaaattaatatgccaatttttggtatttgtttaggtcatcagctgcttgctcttgcagggggctgcaaaacatttaaaatgaaatttggccatcatggagccaatcatcctgttcaaaacttagtttcaaaggtagtttacattacaagccaaaatcacggttttgctgttgacctgacaagccttccagataatattgaaccaaattatatctctttgtttgatcaaagccttcagggaattgcttttaaggataagcctgcattcagttttcaaggacatcctgaggcaagccctgggcctcatgaacttgaggaactttttgtaaaatttaattcaatgattgaagaatatgcctaaa

SEQ ID NO: 319207 - DNA, 621 bp, Unknown
  Bacterial polypeptide expressing nucleotide sequence isolated from the Sargasso Sea
aaaaagaatttggatataaaaaaaataataagaactcatttcatgttgttgcaattgattatggaattaaaaaaaatatcttaagatatttttcaaactttaattgtaaagttactgtcgtttcttgcaaaactagtgcacaaaaaatattaagtttgaaaccaaatggaatatttctatcaaatggccctggagatccagctgcaacaggaaaatatgctatacaaattattaaagatctaattaaaaaaaatttaccaatatttggtatttgtttgggtcatcaaattttagcattggcattaggtggtaaaacaaagaaaatgaaacttggtcatagaggagcaaatcatcctgttaaaaatttagttcatgacaaagttgagattaccagtcaaaatcatggatttgaagtagttaaagaaacattaccaaaaaatattgaagtcacacataaatctttatttgataatagtattgaaggtatcaaactaaaaaataaaccagttttttcagttcaatatcatccagagtctaatccaggacctcaagatagtgtttatttgtttcaagaatttataaacaacataaaaaaaaatgccaaaaagaaaagatattaaa

SEQ ID NO: 319208 - DNA, 577 bp, Unknown
  Bacterial polypeptide expressing nucleotide sequence isolated from the Sargasso Sea
aattgttgcgattgactatggaattaaaaaaaacattttaagatatttttccaactttaattgtgaagtaattgttattccttgcaaccttgaagctgagaatattattaaattgaaacctgatggagtttttttatcaaatggtcctggtgatcccgctgctacaggaaaatatgcaataaatataattcaaaaactaattaaaacaaatattccaatatttggaatatgtcttggacaccaactgttagctttagcacttaaagcaaaaacaaaaaaaatgaaattaggtcatagaggtgcaaatcatccagtaaaaaacctaattaatagtaaagttgagataacaagtcaaaatcatggatttgaagtaattaaggatagcttgccaaaaaatgttgagatgactcacaaatccttatttgataattctgtagaaggaataaaattaaaaaacaaacctgttttttctgttcaatatcacccggagtcaaatcctggtcctcaagatagccattatttatttaatcaatttattaatgaagtgaaaaaaaatgccaaaaagaaaagatattaa

SEQ ID NO: 319209 - DNA, 890 bp, Unknown
  Bacterial polypeptide expressing nucleotide sequence isolated from the Sargasso Sea
aaatactgaaataactagtccatcaaattacagatctttaaaacatttagataaatggttaaaaaaaaataagatagttggaataactggaattgatactagaagtttaacaaatttcattagagataaaggtgctccaaagggtacgatatcctttttcaacaaaaataaattaaatataaaaaaactctttaaaattacaaataaatggagtggtctcaaaaacttagatttagcacaacaagttacaactaaaaaaaattatttgtggcaagattataaaacatggaaaaaggacaatggatatttgaaaaataaaaaaaaaatattgcatgtggtagccatagattatgggattaagaaaaatatcttaagatatttttcagattttaattgtaaagttacaattgtaccatgtaaaacaagcgcaaaagatattttaaaactcgaacctaatggaatatttttatcaaatggacccggggatcctgcagcgacagggaaatatgcaataccgacaattcaagaattaatcaaagaaaagttaccattatttggaatctgtttgggccatcaaatcctagctttagcgcttggtgctaagacagaaaaaatgaagttaggacacagaggagcaaaccatcctgtaaaaaatttggttgagggcaatgttgaaatcacaagtcagaatcatggatttgaagtagtaaaaaaaggtatgcctaaaaatataaaagttactcaccaatctttatttgataatagtattgagggtatcgagttaaaaaataaacccgttttctcagttcaatatcatccagaatctaaccctggtcctcaagatagtgtttatttatttgataaatttgtgaagagtatgaaaaaaaatg

SEQ ID NO: 319210 - DNA, 358 bp, Unknown
  Bacterial polypeptide expressing nucleotide sequence isolated from the Sargasso Sea
atttggaatctgtttaggtcatcaaatgctggcattagcacttggtgctaagacagaaaaaatgaaattaggtcatagaggagctaatcatcctgtcaaaaatttaattgcgggcaatgttgaaattacaagtcaaaatcatgggtttgaagtagtgaaaaaaagtttaccgaaaaatataagaattactcaccagtctttatttgacaatagtattgaaggtattgaattaaaaaataaacctgttttttcagtacagtatcatccagagtctaatcctggtccacaagatagtatttatttatttgataaatttgtaaagaatatgaaaaaaaatgccaaaaagaaaagatattaa

SEQ ID NO: 319211 - DNA, 357 bp, Unknown
  Bacterial polypeptide expressing nucleotide sequence isolated from the Sargasso Sea
ttgaaatttgtcttgggcatcaattattagcgcttaccttaggtggtaaaaccaaaaaaatgaaaattggacataggggcgcgaatcatcctgttaaaaatcttaaagataataaagttgaaataactagtcaaaatcatggatttgaggtgaccaaaaataatttgccatctaaaattgaaatcacacatagatctttatttgataacagtattgagggtatcaaattaaaaaataaaccagttttttcagttcagtatcaccctgagtcaaaccctggacctcaagacagtcactatttatttaataactttattatggaagtaaaaaaatatgccaaaaagaaacgacattaaa

SEQ ID NO: 319212 - DNA, 229 bp, Unknown
  Bacterial polypeptide expressing nucleotide sequence isolated from the Sargasso Sea
aaccgccgagttatgttttactacatctatgactggatatcaggaaattttgaccgacccttcttatgccggccaaattgtaacttttacttttccacacatcggaaacgtgggggtcaatctagaagataatgaggccaacatgccattcgcttccgggatggttgtaaaatggcgccccactttagctttcaattggagatcaccacaaaacttattgaatggttag

SEQ ID NO: 319213 - DNA, 843 bp, Unknown
  Bacterial polypeptide expressing nucleotide sequence isolated from the Sargasso Sea
gttctcacgggtgacgcgttcgggcaccgcggctccgtggtgggtgaggtggtgttcaacaccggaatgaccggataccaggaggtcctgacggacccgtcctatgccgggcagctggtcaccttcacctaccccgaactgggaaacaccggcgtgaatggggatgatcaggaggccgaccatccccatgccaggggagtgatcgctcgccagctcgccccatgtgccagcaactggcgctgttcggaatccctggacaactggatggaacgccacggtcttgtgggcatctgcggtgtcgacacccgtgccttggtgcgtcgacttcgagacggtggagccatcaatggcgtgatcagcagcgatggacgttcgcccgctgatctgctggccgaggtccgtcgcgccccgagcatggagggtctcaatctggccagccaggtcagtaccactgagccctacgaatggtcgtcgccatgccgtgtcggtttcgatcagcggctgaaacagcatcccgacctcccttaccgcgtagtcgcgatcgacttcggcatcaagcgggcgatcctcgaccgtctggtcgcccatggctgtgcggtcaccgttctgccctcggatgccgatctggatacggtgctgtcccatcagccggagggggttttcctttccaatggccctggcgatccggctgcggtgaacagcggcatcgacctggcccggtccctgctggagcgggccaatctgccgttgttcgggatctgccttggccatcagattcttggccttgccttgaagagggaagaccttcaagctcggctacggccaccgtggtctgaaccatcc

SEQ ID NO: 319214 - DNA, 541 bp, Unknown
  Bacterial polypeptide expressing nucleotide sequence isolated from the Sargasso Sea
tttgagatatttttctgatttcaattgtaaagtaactgtagtttcttgcaaaacatcagctgaaaaaattctagcacttaaaccaaatggtatttttttatctaatggtccgggagatccagcagcaactggtaaatatgcaattaaaataattcaagatctaattaaaaaaaatttaccgatatttggtatttgtcttggtcatcaaattcttgcattagcattaggggggaaaacaaaaaaaatgaaacttggtcatagaggtgcaaatcatcccgtcaaaaatttaattaatgataacgtagaaataaccagtcaaaatcatggctttgaagttgtcaaagaatatttacctaaaactattcaagtcactcataaatctttatttgatcacagtatcgaaggtattaaattaaaaaataaacctgtattttctgttcagtaccacccagagtcaaatcctggtccacaagatagcgtgtatttatttcaagaatttattaacaaaatgaaaaaaaatgccaaaaagaaaagatcttaa

SEQ ID NO: 319215 - DNA, 790 bp, Unknown
  Bacterial polypeptide expressing nucleotide sequence isolated from the Sargasso Sea
gagataagggtgcgccgaaaggtacgatttctaacaataaaaaaggtaaattttaacttaaaaaaactattaaacagttctattaaatggcctggattaaaaggtttagatttagcagagacagttacaactaaaaaaaaatatatttggcaaggatttaaaacctggagaaaagaaaagggttttgaaaaaaacaaaaagaaaatatacaaaattgttgcaatagattatggaattaaaaagaacattttaaggtatttttctgattttgattgtgaggtaattgttgttccttgcaatcttgaagcggaagaaatcattaaattaaaacctgatggaatttttttatcaaacgggcctggtgatcctgctgccacaggaaaatatgccacaaatataattcaaaaaataattaaaaaaaatattccaatatttggaatatgtcttggacatcaattgctagctttggcactcaaagcaaaaacaaaaaaaatgaaattaggccacagaggcgctaatcatccagtgaaaaatttaattaataataaagttgaaataacaagtcaaaatcatggatttgaagtagttaaagagagtttgccaaaaaatgttgaggtaactcataaatctttattcgataattgcattgaaggtataaaattaaaaaataaacctattttttctgttcaatatcatcctgagtcaaatcctggtccacaagatagccattatttatttaatcaatttattaatgaagtaaaaaaaaatgccaaaaagaaaagacattaaa

SEQ ID NO: 319216 - DNA, 918 bp, Unknown
  Bacterial polypeptide expressing nucleotide sequence isolated from the Sargasso Sea
gtagtgttcaacaccgttcttagcggctatcaagaagtcataacagacccctcctatgctgggcagatcatcactttcacctatccacatattgggaactatggagtaaataaagtcgacaatgaaagtgatagcccacattgtaggggggtcgttgtgagagatttggctcgccgtcacagtaattggcgtgcaacaagcgatttaaactctttcctgaaagaaatggaaatatcaggaatagcgggactcgatacgcgcaggctaaccatgcatataagagaatctggagctatgcctgctgcttttggaacactcgccgctgatgagcttcacgaaattgctaaatctgagccaggaacgtcaggtattgaccttgtctcgcaagtcacaaccagcgagagctacatgattgacggggatcgtaaagacaagttaatcgttgccatggattttggtataaaagcgacgattataaatcatttaaagcgcctcggaaatgttttcgttgttccagcatcaacatcctccaaggaaattctggaacttaaacccgatggtgtttttctatctaacggaccaggtgacccggaagttgtgaaaggggcacctgagacaatatctgaattgatcgggaaggtgcctatctttggcatatgtcttgggcatcaacttcttggattggctgtaggcggaagtataaagaaaatgacctttgggcatcatggaggaaatcatcccgtgcggcaagtatcaaatggtgtcgttgagatcacaagccaaaatcataattttgctattgacccagactcagtggcaaaagttgcggaagtaactcacgtaaacctaaatgatggggtttgccaggggataaagcttaaaagcgctgcagcattcagtgttcagcaccacccagaa

SEQ ID NO: 319217 - DNA, 688 bp, Unknown
  Bacterial polypeptide expressing nucleotide sequence isolated from the Sargasso Sea
atttagatcttgcagaaaaagtaaccacaccaaaaaattatattatggaaaggtcataaaacatgggaaaaaagaattaggttataaaaaaaatagtaaaaattcttttcatgtagttgctatagattatggaattaagaaaaatattctaagatatttttctgacttcaagtgtaaagtaactgtggtttcatgtaaaacgtctgctgaaaaaattttagcccttaaacctaatggtatatttttatcaaacggtcctggagatccagcagcaactggaaaatatgcgattaaaataatcaaagatctgattaaaaaaaacctaccattatttggtatttgccttggtcatcaaatactagcattaacattaggtggtaaaacaaagaaaatgaaactgggacacaggggtgcaaaccatcctgttaaaaatttaatcaatgacaatgtagaaatcactagtcagaatcacggttttgaagttgtcaaagaaaatttaccaaaaaatattgagattactcataaatctcttttcgataacagtatcgaaggtataaaactaaaaaataaacctgtgttttctgttcaataccatccagagtcaaaccctggacctcaggatagtgtttatttatttcaagaatttattaataacatgaaaaaaaatgccaaaaagaaaagatcttaa

SEQ ID NO: 319218 - DNA, 688 bp, Unknown
  Bacterial polypeptide expressing nucleotide sequence isolated from the Sargasso Sea
cacacccttgatcttttgcgggaagaagcgatggcgctgccttctatggaagggagaaatctggccagagtggtttcgaccaaggaaccttatttctggcctgcggaaacggagggtgttcccttgaaagtcgtggcatacgatttcggcatcaaacgcaacatactgcggttgatgtcagcattgggaatcaacatcaccatcgttccatgggacacgcccgctgaagtagttcggcagatgaatccggatggtgtttttctttccaacggccccggtgatcctgccgcagtggaaagcgctattgaagaagtccgcaacctactcggagtttttccgatttttgggatctgcctcgggcaccagattctggctttggccttgaactgcaaaacctacaaactcaaatgcggacatcatggagggaaccatcctgtaaaggattaccagaccaacaagattgagatcacaagccataatcatggattctctgtggacgaagacagtcttccggaagacgtcagagtgacccacaggaaccttaacgatcaaacggttgaaggtctggaatcgcttcagtactccgcttattcagttcaataccatcccgaggcggcaccaggcccgcgggatgcccgttatctcttcaaacggtttgttgggatgatgggaaacaccaagcgttgaa

SEQ ID NO: 319219 - DNA, 681 bp, Unknown
  Bacterial polypeptide expressing nucleotide sequence isolated from the Sargasso Sea
atttagcgaaagattttgaaggtttagctggtttagatctcgcaaaagaagttacaacagaatctagttatgattggaaagaaggaacatggagaggaagtaatggtgaatctgattttagagttgcagttttagatttcggaattaaaaaaaatatattaagaatattagttgatcaagggtatgaattaaaaatttttcccgcaaaaacttcttaccaagaaattatagatttcaaaccaaatggggtgtttttgtccaatggacctggcgatcctgaaccatgtatttatgccattgagataattaaagaattaatacaaatcagtatgcccatatttggtatttgtctaggtcatcaattactagcaatagcattgggtggcaaaacatcaaaaatgaaatttggtcatcatggtgcaaatcatcctgtccaagatctcaaaactaataaagtttcagtaagctctcagaatcatggcttcacagtcgaagaaaattccttacctgcaaatgttgagataactcataaatcattatttgatggaactattcagggaatccagcattcatctaaaccttttttcagttttcaaggccatcctgaagctagccccggacctcatgatttggcatatctattcaaaacatttgataaaaatatgactaaaaatgcctaga

SEQ ID NO: 319220 - DNA, 703 bp, Unknown
  Bacterial polypeptide expressing nucleotide sequence isolated from the Sargasso Sea
gtgtatatacccatcagaaaaaataactgataaagaagctatgatacaaatcatagacttcggctcaatttctgataagaatcttataaaaaatgtagcgacgaattcaaaattttttattggggagaaaaaaaataagtcgcagaagagaattgctgcagtagattttggagtaaaagaaaatattcttagaatttttaaagatatgggagcagtaatagaagtttttcctcctgactgcactgctgaagaggttttaaattcaaaacctgatggagtattcttttctaatgggccaggagatccagaggttttatctcatgctgtatctcaaataaagcttttaatggaaaaaaatattccaatgtttggaatatgtcttggacatcaattaatgtcccttgcgtatggcttaaaaattatgaaaatgccattcggacatcacggtgctaatcatccggtacatgacttagagactaacgaggtctttatcacatcccaaaaccataactttgctgtaaaggagccaattaataatgacagtatcaaaatcacacataagtcactatttgataacactattcaaggattagctcacaaagaaaaaccattttattcaattcaatgtcatcctgaagcaagtcctggaccaaaagaatttgaagtgctatttaaaaaattttttaaggaaatgaatgcctaa

SEQ ID NO: 319221 - DNA, 886 bp, Unknown
  Bacterial polypeptide expressing nucleotide sequence isolated from the Sargasso Sea
ggagctaaaaaagtagcaattggcgaaattgttttcaatacttccatgagtggctatcaagaaataataactgatccatcttattgcaaacagattattacatttacccatcctcatataggcaatacaggtattaattctgaagataatgaatcagataatatatatgctgaaggagtcgttatcagaaattatatctctaagccaagcaactataggtctgaagaaaatcttgatagttttttgacaagaaataactctattgggatttttggaatagataccagacagctaacaattattttgagggaaaaaggctcattgaaagcatgcattagtccgatagatgaaaataatgaagaatcagcaatatctttagcaaaaagctttgatggtcttgagggaatggatttagccaaagaagtaactacgaaaaatttatattcttggaatgagggagtctggcctgattataaagagtcagaaagcaagctgcatatcgttgcatatgactatgggattaaaaagaacattttaagactactttctgagcatgttgggaaagtaacagttgtaaatgcaagatgctcttttgatgaagttctaaagatgaatccagatggtatctttttgtcaaatggacctggcgatccagagccatgcgattatgctattgaaaatattaaaagggcactaaatgaaaatattcctatatttgggatctgccttggtcaccaactattaacacttgcaggtggagcaaaaactgaaaaaatgaaatttggccatcatggagcaaatcatcctgttcaatctctaaaatccaaggaagtattcataacaagtcaaaatcatggctttgctgtgaacgaggactcatgccaaa

SEQ ID NO: 319222 - DNA, 649 bp, Unknown
  Bacterial polypeptide expressing nucleotide sequence isolated from the Sargasso Sea
tatgtatggaaaggttttaaaacttgggaaaaaagacaaaggttttgaaaaaaacaaaaacaaaaaatacaaaattattgcaattgattatggaattaaaaaaaatattttaagatatttttctaactttaattgtgaagtagttgtagttccttgtaatcttgaagctaaagaaattattaaattaaaacctgatggtatttttttatcaaatggccctggagatcctgctgcaacaggaaaatatgcaataaatataattcaaaaattaattaaaacaaatattccaatatttggaatatgtcttggacaccagttgttggctttggcattgaaagcaaaaacaaaaaaaatgaaattgggccacagaggtgcaaatcatccagtaaaaaatctaattaatagtaaagttgagataacaagccaaaaccatggatttgaagtaatcaaaaaaagtttgccaaaaaatgttgaaatgactcataaatctttatttgatgatagtgtagaaggaataaaactaaaaaataaacctgttttttctgttcaatatcatccggagtctaatccaggtccgcaggatagccattatttatttaatcaatttataaatgaaataaaaaaaaatgcccaaaagaaaagatattaa

SEQ ID NO: 319223 - DNA, 218 bp, Unknown
  Bacterial polypeptide expressing nucleotide sequence isolated from the Sargasso Sea
aaatcatgggtttgaggtagataaagataatatgcctgatgatgtggagataacacacttatctttatttgatcaatctatcgaaggaattaaatcaaaaaaatataaagctttttcggtacaatatcatccagaagcaagtcctggtccccatgatagtcattatttatttatagaatttatcaaagaagttgaaaaacatgccaaaaagaactgac

SEQ ID NO: 319224 - DNA, 712 bp, Unknown
  Bacterial polypeptide expressing nucleotide sequence isolated from the Sargasso Sea
gaatctgataaaatttggacaagaggagtaatatttaattctgaaataacaaacccttcaaactatagatctcttaaacatttagatgaatggcttaaaaaaaataaaattgtaggtattacaggacttgatactaggagtttaactaattttatcagagatcagggggctccaaaaggtacaatttcaaataataaatctggcaagtttaatattaagaaactcattaaaaaaacaactatttggcctggtttaaaaggaatggatcttgcacaggaagtatcaactagaaaaaattatacatggaaaggccttaagacatggagcaaagaagaaggttataaaaaaaataacaaaaaaagatttagagttattgcaatagattatggaattaagaaaaatattttaagatacttttctaactttgactgtgaggtaaaggttgtatcttgtaaagaaagtgctgaaaatttattaaaacttaaaccacatggaatatttttatctaatggtccaggtgatccagctgctacaggtaaatatgcaatttcaaccgttcaaaaattaataaaatcaaatcttccagtttttggaatttgtctaggtcatcaaattttagcattagcgttaaatgcaaaaacaaaaaaaatgaaattaggacatagaggtgctaatcatcctgtaaaaaaatttaatttcaaagaaggttgaa

SEQ ID NO: 319225 - DNA, 871 bp, Unknown
  Bacterial polypeptide expressing nucleotide sequence isolated from the Sargasso Sea
gataacaagactatctttaagggaataggtcttggctttcatggaacagcaactggagaagtttgtttcaatacgtcattaacaggatatcaagaaataatttccgatccatcttacgctggccaaattataaattttacattccctcatatcggaaatgtcggtaccaataaagaagatatggaatctgacaaaatttggactagaggggtcatatttaattcagaaattaccaatccatcaaattatagatctcttacacatctggatcaatggttaaagaaaaataaagttgtggggctaactgggattgatactaggggtttaacaaatttcataagagacaaaggagctccaaaaggaacactatctataagcaagactggaatttttaatataaaaaaattattaaatcaatctattaagtggcatggattaaatggtttggatttagcgagtgaagttactacaaaaaaaagttacacctggggtggtttaaaaacttggaaaaagggtgttggctttaaaagatcctctaaaaataaattgaagataatagctatcgattacggaataaaaaaaaatattttaagatatttttcggattacgattgtcaggtcaaagtagtttcatgtaacctacctttagaaaaaattcttgattttgaacctcaaggaatttttttatcaaatggaccgggtgatcctgctgcaactggcaaatatgcaatacctgttatcagaaagcttattaagaaaaatattcctatttttggtatttgtttaggacatcaattattaggactagcactgaaagctaaaacaaaaaagatgaagttaggtcatagaggtgcaaatcatccagttaaaa

SEQ ID NO: 319226 - DNA, 535 bp, Unknown
  Bacterial polypeptide expressing nucleotide sequence isolated from the Sargasso Sea
ttgagtaatcctgaagcaatattaatgttggcagatgggactaagttccatggatactcaattggtattaaaggttttgcagttggtgaagttgttttcaacacttctatgacaggttatcaagagataattaccgacccatcgtatgatagtcagattatctgttttacaaatccacacattgggaatactggaattaatttcgaagattatgagtcaaataaaatttatgcatctggaattattataaaagacgaggatattgcttctcataattggcgtgaaaaaaattctttaactaattatttgaaagaatcaaataaattagctattgccggtatagatacaagaagattaactaaaatcttaaggaaaactggctctcagaatgcttgtataattacagactccacagatacaaaaaaagcagaaactaaattaaaagaatttcatggcctagacaataaagatttagctattaaagttacctcatcggaaccatatatgtggaatgagggaataataaatatttata

SEQ ID NO: 319227 - DNA, 757 bp, Unknown
  Bacterial polypeptide expressing nucleotide sequence isolated from the Sargasso Sea
acctcggcgaatgtccagctggcgcaacgcgtgcggattgacggactatctgagcgatcgaaatgttgtgggtatcgggggtttggatacccgcaggctcactcgacttttaagagatcagggatctcaaaatggttgtatcgtagcggctaaagagatcggcccatctgacatagatcgcgccaggcagtcggcactcgattttcccggtctggcaagaatggatcttgcgaaggaagtcaccacgagcgaggcctacgaatggcgccaggggacatggcagttggggcggggttaccggaatgttgaagaaacccgttttcatgtcgtcgctttcgattttggcgttaagcgaaatatcctcagaatgttggcggatcggcgttgtcgattgaccgttgtacccgccaagacgacggctgccgaggtgctgcagctcaaaccagatggaatttttttatccaatgggccgggtgaccccgaaccctgcgactacgccatagaggcgattcgtgctttgttgtcagagaatttaccggtctttggtatttgccttggtctccagttgcttggacttgctgcaggcatgaagaccatgaagatggggcatgggcatcacggtgccaatcatcccgtcaggaatctcatggacaacaccgttctgattacgtcccagaatcacggattctgtattgacgatgcatcgttacctcagaacgtcaaaatcacccatcggtcgctttttgacgatacgatc

SEQ ID NO: 319228 - DNA, 673 bp, Unknown
  Bacterial polypeptide expressing nucleotide sequence isolated from the Sargasso Sea
gatgatacataaaaaagttattggcatctgtaacgtagatacccgaaaaattactaaaaaaattagggaccaaggggcccaagatgtagcaatagagcacaggaaggacagaaaatttcttgatgaagaattatccaaaaaactattgaattttccaggcttaaaaggaatggaacttgctagaaatgtatcttgcagaaagccatacaactttactgagttgggttttccatggatagaacaaaaacgtgtaacaggaaagaaagttgtagttatagattatggaataaagactaatattcttaggaagttagcttcttatggttttgaaataaccgtagtacctgctgattttcctgcagatgaaattttaaaacttaacccacaggctatctttctatcgaatggtccaggggatcctgcagctacccacaactactctggacctataatcaagactataatttcacaaaagaaccttcctatctttggaatttgcctaggacatcaactacttggtttggctttaggtgctcaatcaaaaaaaatgcatcacggtcatcatggagcaaatcaccctgtgaaagagttaaagtctggcaaagttatagttacctccatgaaccacgggttcaatattgattccgagtcacttccaaaaggtaccattgaa

SEQ ID NO: 319229 - DNA, 874 bp, Unknown
  Bacterial polypeptide expressing nucleotide sequence isolated from the Sargasso Sea
atttttacatttagactcatggcttaaaaaaaataaaattgttggaataactggcttagatacaaggtcattaactaatattattcgggataaaggagctccaaaaggaactatttctttttcaaaaaaaggtaagtttaatattagtaaactatataatattacatcgaagtggggtggtttaaataatttagatcttgctgaagaagtaagtacaaaacaaaactatttatggaaaggttttaaaacttggaagaagggattgggatataaaaaaaataaaaaaaattcttttcatgttgtcgctatagattatggcataaagaaaaatattttaagatatttttcagattttgactgtagagtaacagttgtgtcatgtaaaacagatgctgataagataatttcactcaatccaaatggggtttttctatcaaatggacctggtgatccagcggccacaggaaaatatgctattgaaattattaaaaaattaatcaaaaaaaacttaccgatttttggtatttgccttgggcatcaaattcttggtctagctttaggtgcaaaaacaaaaaaaatgaaacttggacatcgaggtgcaaaccatccagttaaaaacttaatagatggtaaggttgaaattacaagtcaaaatcacggctttgaaatagttcagcgagacctgccaaaaaatattgagataacacataaatcattatttgataacagtatcgaaggtataagattaaaaaataaaccagtattttcagttcagtatcaccctgaagcaaatcctggaccacaagatagcgtatatttatttaagaaatttattaacaatatgagaagtaatgccaaaaagaaaagatattaa

SEQ ID NO: 319230 - DNA, 891 bp, Unknown
  Bacterial polypeptide expressing nucleotide sequence isolated from the Sargasso Sea
cctcaaattacagatctcttaaacatctagatggatggcttaaaaaaaataagattgttggaataacaggaattgatacaagaaatttaactaattttattagagaaaaaggtgcacctaaaggaacgatatctttttttaaaaaaaataaattaaatataaaaaaactccttaagataactcaaacttggagtgggctcaaaaatctagatttagctgagagagtaacaacaaaaaaaaactatgaatggcaggatttcaaaacttggaataaaacaaatggttttttaaaaaataaaaaaaagattttgcatgtagtagcgatcgattatggaattaaaaaaaatattttaagatatttttcagatttcaactgtaaagtaactattgtttcttgtaagacaagtgcggctgatataattaaagaaaaaccaaatgggatatttttgtccaacggaccaggagatccagctgctactggtaaatatgctataccaataattaggaaattaattaaaaataacttgccgatatttggaatttgtttaggacatcaacttttagctttaacattaggtgcaaaaacagaaaaaatgaaacttggtcatagaggagctaatcatccagtgaaaaatttaattaagggaaatgttgaaataacaagtcaaaatcacggttttgaagttatgaaaagaaatttgcctagaaatattagaattactcatcagtccctttttgataatagcatagaaggtatacaattaaaaaataagcctattttttctgttcagtatcatcctgagtctaaccccggaccacaagatagcgtctatttatttaatcaatttattatgagtatgaaaaaaaatgccaaaaagaaaagatattaaa

SEQ ID NO: 319231 - DNA, 466 bp, Unknown
  Bacterial polypeptide expressing nucleotide sequence isolated from the Sargasso Sea
gaaattattaaatataatccgaagggtatatttttatctaatggtccgggagatcctaagccttgtgattatgcaattgaaaacattagaaaatttcttgaacataagattccaatttttggtatttgtcttggacatcaattattagctcttgctggtggggctaatacttacaaaatgaaatttggtcatcacggagcaaatcatcctgttcaagacatggcttccaaagatgtttttattactagccaaaatcatggcttcgctgtagatgaaaacactttgcctaaaaatattaaagttactcatgtatctctatttgacaaatcacttcaaggcattgaatttatcgataggccggcatttagtttccaaggacatcctgaggcgagccctggccctcaagagatacagatactttttgaaaaatttagtgctatggtaaaagagtatgccaaaacgtaaa

SEQ ID NO: 319232 - DNA, 548 bp, Unknown
  Bacterial polypeptide expressing nucleotide sequence isolated from the Sargasso Sea
aaaatattttaagatattttcagattataattgtgaggtaaaagttgtttcttgtaaaacaacttccgagaaaattacgaaactaaagccagatggaatttttttatcaaatggtccgggagatccagcggcaactggaatatatgcaattaaaactatacaaaaattaataaagtggaattatccaatttttgggatctgcctaggtcatcaaattttagctttagcattaaatgccaaaacaaaaaaaatgaagttaggacataggggagcaaatcatccagtaaaaaatttaattaacaacaaagttgagattacaagtcaaaatcacggtttcgtagtaatagaaagtagcttatctaaaaaaattcaaataacccataagtcactttttgataacagtattgagggtataagattaaaaaataaaccagttttttcagttcaatatcaccctgaagcaaatccaggaccacaagatagtcaatatttatttaacaattttattcaggatataaaaaaatatgcccaaaagaaaagacattaga

SEQ ID NO: 319233 - DNA, 781 bp, Unknown
  Bacterial polypeptide expressing nucleotide sequence isolated from the Sargasso Sea
aacaaagaagatatagaatctgataaaatttggactaaaggagtaatttttaattcagaaataactgacccatcaaactatagagcttttttacatctagatgcatggctaaagaaaaacaaaattgttggtctcactggtcttgatactagaagtttaactaattttattcgagacaaaggtgcccctaaaggaacgattgctttctcaaaaaaacaaaaattaaatataaacaaactaactaacgctactttaaaatggagtgggttaaaaaatcttgatctagctaaagaagtatcaacttcaaaaaattatatttggaaaggttttaaaacttggaaaaagaaagatggatttgtaaaaaataaaaaaaatcactttcatgttgtagcaatagattatggaattaaaaaaaatattttgagatatttttctgatttcaattgtaaagtcacagtagtacactgcaaaacatctgctgaaaaaattttaagtcttaaaccaaatggaatatttttatcaaatggccctggagacccagctgccacaggaaagtatgcaataaatataattaaaaaccttattaaaaaaaatattccaatatttggcatttgtttaggtcaccagattcttgctttagcgcttggtggaaaaacaaaaaaaatgaagttaggtcatagaggtgcaaatcatcctgtaaaaaatttaattcatgacaacgtagagatcactagtcaaaaccatggctttgaagttgttaaagaaacttaccaaaaaatat

SEQ ID NO: 319234 - DNA, 601 bp, Unknown
  Bacterial polypeptide expressing nucleotide sequence isolated from the Sargasso Sea
aacaaaaagaaaaaatataaaattatttgcaattcgattattgggattaaaaaaaatatattaagatatttttctaattttaattgtgaagtaactgttgttccttgtagactagaagctgaagaaattattaaattgaaacctgatggaatctttttatcaaatggtcctggtgatcctgccgcaacaggtaaatatgcaataaatataattcaaaaattaattaaaacgaatattccaatatttggaatatgtcttggacatcaattgttagctttggcacttaaagcaaaaacaaaaaaaatgaaattgggccatagaggtgcaaatcatccagtgaaaaatttaattaatagtaaagttgaaataacaagtcaaaatcacggatttgaagtagttaaagaaagcttgccaaaaaatgttgagatgactcacaaatctttatttgataattctgtagaaggaataaaattaaaaaataaacctgttttttctgttcaatatcatccagaatcaaatcctggtccgcaagatagccattatttatttaatcaatttattaatgaagtaaaaaaaaatgccaaaaagaaaagatattaaa

SEQ ID NO: 319235 - DNA, 400 bp, Unknown
  Bacterial polypeptide expressing nucleotide sequence isolated from the Sargasso Sea
aatagacgtaatcaaagaattaataaaaaaaggtctaccaatctttggtatttgtttggggcaccaaatattaggacttgctttaggggcaaaaaccaaaaaaatgaaattaggacatagaggtgctaatcacccagtcaaaaacctagataatggatgtgtagagattacaagtcaaaatcatggttttgaaatagtgaaaaattcaataccaaaaaatactgaagttacacatatttcgcttttcgataatagtattgaaggaattcgattaaaaaataaacctgttttttctgtacagtatcacccagagtcaaatccaggacctcaggatagtgtttatttatttaaagaatttgtaaataaaatgaaaaaatatgccaaaaagaaaagatattaa

SEQ ID NO: 319236 - DNA, 754 bp, Unknown
  Bacterial polypeptide expressing nucleotide sequence isolated from the Sargasso Sea
tacgaagaaagtggtaattttaaaatagaaacgttaaaaaatgaattaaaaaaacatccaaaaatggatggattaaacctttcatcatccataactactaaaaagcaatacaaatttactgaaagtgtacataagttaatatcatcagaagttttaaatttaaaaaacttcaaactcaaaattgcagttatagattttggtgtaaaacataacatacttagacaccttgttaacttaaatgcagaagttaatgttttctctgaaaatacaaatattgaggaaataaacaatttcaaaccagatggtatattcttgtctaatggcccaggagatccatcagcaaccgagataaaatgcagaaaactgttaaatgatttatttcaacttaaaattcctgtttttggaatatgtattggtcatcaattaattggactatcgtttggagcaaaaacaaataagatgcctcaaggtcatagaggcgcaaatcatccagttaagaatttattaaacaataaagtggagattacaagtcaaaaccatggttatgaaatagacatagattctttaccaaattgtctagaagtaacacacacatctttatttgataattcaatagaaggtataagacataaatcattaccaatcttttcagttcaataccatccagaggcttctccagggccaactgagtcatcctatttgttcaatgaattcttaaacttaattaaagtatcaaaaaatgccaaaacgtaaa

SEQ ID NO: 319237 - DNA, 562 bp, Unknown
  Bacterial polypeptide expressing nucleotide sequence isolated from the Sargasso Sea
tatgatttttggaattaaacaaaatattttacgtaatttaaataatttagattttaatttaactattatcaattccaaaagttcaattaaagatgttctatctactaaaccagatggtatttttttatctaatggtccaggagatccatttgctacagcagaacatattgttcctactttaaaagaaataatctcaaataaaattccaatctttgggatttgtcttggtcatcaattaatcagtcttgctttaggcgcaaaaactaaaaaaatgtttcaagggcatcgtggtagtaatcacccagtaaaaaatctgaatacatcaacagttgagataacttcccaaaaccatggttttgaagttgacagaaatacattttcaaatgatattatagaaacacatatatctttatttgatggaacaaatgaaggtatcaagcataaatctcttcccatatttagcgttcaataccaccctgaggcaagtccaggtccacatgatagcaattatttattcaaagaattttttaaaattataaaaaataatgccaaaaagaactga

SEQ ID NO: 319238 - DNA, 853 bp, Unknown
  Bacterial polypeptide expressing nucleotide sequence isolated from the Sargasso Sea
gaaatgttttttgaaaaatggttaaaaaacaatagaaaaatttgtattgcaggcgtggatacaagaatgctaacaaaaaagataagagaaaatggagcatgtaacgcacttattcatttttctaaaaataaatcttttaacttaaaaaaactaaaaactaatttagagaacacagagtcaattaaaaatcaagatttggcatcacaaatctcaactaaagaaatttatcaatggaaaaataataaaaaacaaaaatttaaatttaaaaatctcagcaataaatggattgcagtcatagactttggcattaaaaaaaatattttaaaacttctggaagatctagattatgaaataattgtatttggaatagattttgactttaaaaaaattgtttcatataaaccaaaaggatttttcttgtcaaatggaccaggtgatccaatggcaacttataaaaaaataaagaataaaattaaatatcttactcataaaaacattccaatttttggaatttgcttgggacatcaaattttggcattaggatttggagcaaaaacagaaaagatgaatcatggtcatagaggtgcaaatcatccaattaaaaataacaataataaagttgaaattactgttcaaaatcatggatttgttgtttcaaaaaaaaaattaccaaacaatatatcagtaactcataaatcactttttgatggaacaatagcaggaataaaaatttttaaaaaacctttcttttctgttcaataccatcctgaagcatcacctggacctcatgatagtagatatttattcaaagaatttaaaaataaaatagatatatatgccaaaaagaactgat

SEQ ID NO: 319239 - DNA, 696 bp, Unknown
  Bacterial polypeptide expressing nucleotide sequence isolated from the Sargasso Sea
caatacaaaaagcaaaaaacttttctggactagaaggtttagatttagctaaagttgtttcaacgaaagaaaattatttgtgggatacaggggtttggcctcactacacaaaatctactttagattatccaatagttgcaatggactttggaatcaaaaaaaacatattaaatctattgtctgacactcttggaaaagttcatgttgtgaatgctcaaacagaatataatgagataaaaaaattaaatcccaaaggcatttttttatctaatggtcctggagatccagagccttgtgattatgctataaagaatataaaaaaatttcttgaagacaagattccaatattcggaatatgtcttgggcatcaactacttggtcttgcttcaggtgcacagacttttaagatgaaatttggtcatcatggagcaaatcatcctgttcaagactcaaaaacaaatgaagtttttataacaagtcaaaatcatggtttcgcagtagacattgaaacacttcctaagaatgtaaatgttactcatcaatctttatttgataaatcccttcagggcatagaattctctgatagaccagcattttcatttcagggccaccctgaggctagtcctggaccgcatgagatacaaattttatttatgaaatttaaaaaaatggttgaagaatatgccaagacgtaaa

SEQ ID NO: 319240 - DNA, 661 bp, Unknown
  Bacterial polypeptide expressing nucleotide sequence isolated from the Sargasso Sea
cttgatcttgctaaggaagtgtcaactcaaaattctttctcttgggatgagggtacttggccaaattatgaagaggttaaaaatgaaaaactaatagttgcaattgattttggcgtgaagaaaaatattttaagacttttaagaaagcatgttggaaaggtacaagtagtcaatgcagaaatttgctttgatgagcttatgcagttcaaaccagacggggtatttttatctaatgggcccggagatcccgagccttgtatttatgcaatagaattaattaagcaattacttgatattaatataccaatttttggtatatgtttaggacatcagcttctagccctttcgggtgggtgtaaaacatataagatgaagtttggtcatcatggagctaatcatccagtgcaagatatggtatctaaagtggtacatataactagtcaaaaccacggttttgcagttgatttttcaagcctacctgaaaatattgagcctactcatatctcgttatttgatcaaagcttgcaaggtattgcttttaaagataagtctgcgtttagttttcaaggacatccagaggcaagtcctggaccccatgagctcgaagaacttttcataaaatttaatttaatgatcgataagaatgccgaaaagaagtgat

SEQ ID NO: 319241 - DNA, 448 bp, Unknown
  Bacterial polypeptide expressing nucleotide sequence isolated from the Sargasso Sea
aatgcctgttatgggcatctgcttaggtcaccaattgatgggcttggctgctggtctcaggacttacaagctaagatatggacatcgggggtcaaaccaaccagtaatggatctagagaccgggagagtccacatcaccagtcaaaaccatggtttcgcagtggaggacccagtcaaaggtatgctggccccacacccaagtggaacttgctccgacgagtccgaaaacgtattgggggccgacttcaaagtaaggcacgtaaactcaaatgatggaactgtggaagggttggaccttcttgacaaacccgcatttacaatccaattccaccctgaagcttgccccggaccacacgatgcttccccactctttgatagattccaggatattgtggatcaataccttagcacttccaaagcggaaatcgccacaagaggtgagtcctga

SEQ ID NO: 319242 - DNA, 703 bp, Unknown
  Bacterial polypeptide expressing nucleotide sequence isolated from the Sargasso Sea
aattactgatccctcatatgcaaagcaaataatcacttttacaaatccgcacattggaaatacaggtatcaacgaagaagataatgaagctagttctatttatgcaagtgggattgttattaggtctctaacggaaatacctagcagctggagaagcacaacctctcttcaggatttcttaataaaaaataattcaattggaattagtggtattgatactagaaagcttgtaaatactttgcgagaaactggttcacaaagagcaatcattgccgcaaatgagtcactggatccaaaagatgctaaaaaagaattagaaaaattttctggactcggggggcttgatttggcaaaggtagtctcaacaaaagattcatatagatgggatgagggcgtatggcctgatttcaaaaaaacttcatcagattttcacatagtggcaattgattttggaataaaagaaaacatcctcaggctgctagctgaacatgtcggtaaaataactgttattaatgcgcaaataccaattgaggaaattctaaatttaaaaccagatgggatttttctatccaatgggcctggagatccagaaccttgcgactacgcaattcaaaacattaagattgctttggacaaacaaattccaatttttggtatttgtttaggacaccaacttctagcaattgcaggcggttgcaaaact

SEQ ID NO: 319243 - DNA, 718 bp, Unknown
  Bacterial polypeptide expressing nucleotide sequence isolated from the Sargasso Sea
aaaaaaaatgcaaaattagttttaagtaatggaattgtattccctgcattttcctttggagcttcaggtactgcagttggagaaatagtctttaatactggaatgactggttatcaggaggttattactgatccaagttactttggacaaattttgactttcacctatccagaaattggtaatactggtattaactttgaagattcagaatctagtatttgtgtcaaaggaataatcgttagaaattattcatcaaataatagtaactggagatctcagaagaaatttgatcagtggttagttgaaaataatgtcatgggtctttatggaattgatacaagggctcttgtcaaaatcttaagatcacatggctcgatgaatggagttcttacctctgaagataaaactgtagaaagttgtttaaagataatttatgaaaccccaaaaatggagggattgaatctatcaaaagtagtttcaacaaaacaacaatatttttggcaaaaccccactgaaacagattttgatgttagaaaaagatattctgataagcctgataagttaaaagtgatagcgattgattttgggataaagaaatcaattttaaatagacttgtctcacatggatgtgaaattctagttttaccttctagttcttcttttaaagatgtcttatctaataatcctgatggcatattcttctcaaacggaccaggcg

SEQ ID NO: 319244 - DNA, 319 bp, Unknown
  Bacterial polypeptide expressing nucleotide sequence isolated from the Sargasso Sea
aaaacaaaaaaaatgcagctaggtcatagaggtgcaaatcatccggttaaagatttaacaactagtaaagtagagattacaagtcaaaatcacggttttgaagtagaccctagctcaataccaatctcaatgactgtcacacataaatcgctgtttgatggaagtatagagggcatagaggttaagggggaaaaattattttctgtacaatatcatcctgaagcaaaccctggcccacaagacagtaagtatttatttgataaatttttaaaaaacataatagcagctagaaaaaatgggaaaaagaaaagatattaaa

SEQ ID NO: 319245 - DNA, 517 bp, Unknown
  Bacterial polypeptide expressing nucleotide sequence isolated from the Sargasso Sea
tctgaaactctttggaagagttcatgttgtgaatgctcaaacagaatataatgagataaaaaaattaaatcctaaaggaatatttttatctaatggtcctggagatccagagccttgtgattatgctattgagaatataaaaaaatttcttgaagacaagattccaatatttggaatatgtcttgggcatcaactacttggtcttgcttcaggtgcacagacttttaagatgaaatttggtcatcatggagcaaatcatcctgttcaagactcaaaaacaaatgaagtttttataacaagtcaaaatcatggttttgcagtggacattgaaacacttccaaagaatgtaaatgttactcatcaatctttatttgataaatctctacagggcatagaattctctgataggccagcattttcatttcagggccatcctgaggcaagccccggaccgcatgagatacagattttatttatgaaatttaaaaaaatggttgaagaatatgccaagacgtaa

SEQ ID NO: 319246 - DNA, 409 bp, Unknown
  Bacterial polypeptide expressing nucleotide sequence isolated from the Sargasso Sea
cctgatgctacaattaaaataatacttccaactattaaagaacttatcaaccttcaaattcctatatttggaatctgtttgggtcatcaattaataaaccttgctttaggtgcaaaaacaaaaaaaatgtatcagggtcatagaggtgctaatcaacctgttaaaaatttaataaacaatactgttgaaataacctcacaaaatcatggttttgaagttgatagagcaagtctacccatcgaaattgaagaaacacacatatcgttatttgatggatcaaatgagggcattagacataaaactcttcctgtatttagtgttcaatatcacccagaagcaagtccaggaccacatgatagtgcatacctgtttaaagaattttataaactagttaaggttaatgcctaaa

SEQ ID NO: 319247 - DNA, 241 bp, Unknown
  Bacterial polypeptide expressing nucleotide sequence isolated from the Sargasso Sea
attgaaatcggcagctatactaatcgatgacgggacaataataccagctaaatcgattggaagtgatcaaataagcgtcggagaaatagtctttaatacttcaatgacaggctatcaagaaatcataactgacccatcatatgacaggcaaatcattacttttacaaatcctcatatcggcaatactggaataaattttgatgattatgagtctaatgagaatggatgttctggtattatt

SEQ ID NO: 319248 - DNA, 628 bp, Unknown
  Bacterial polypeptide expressing nucleotide sequence isolated from the Sargasso Sea
attgggaaagaaacaactttggtttaacaaaaatactaataagaaaaaggaatataatgttacttgtttagacttcggtattaaaaataatattttgagaaatttatgtgaatataatttaaacccgactgttctgaatttattttctaattttgatgaaattatgaataccaaacctgatggcatatttttatccaatggacccggagatccatatgcaactggagaaaacatcgttaaaactttaaaaaaattaataaagattgagataccaatttttggtatttgtctaggacatcaaatattaagcttggctttaaacgctaaaacaaaaaaaatgtttcagggtcatagaggatcaaatcatcctgtgaaaaatctaaaaagggattttgttgaaataacatcacaaaatcatggatttgaagttgatagaaatactttttctgatgatattgttgaaactcatgtttcattatttgatggatctaacgaaggactaaaacataaacacctacctatttttagtgttcaatatcatcctgaagcatctcctggacctcatgatagccattatttattttcagatttttatcaactcattgaaaaatatgccaaaaagaactga

SEQ ID NO: 319249 - DNA, 613 bp, Unknown
  Bacterial polypeptide expressing nucleotide sequence isolated from the Sargasso Sea
tggaaaagtgataaatcagataaaagccaatctaaatataatgtcacttgtttagactttggtatcaaaaataacattttaagaaatctaaatgaatttaatcttaacccaactgtattaaacttattttctagctatgaagaaataatagaaaccaatccttcgggaatttttttatcaaacggccctggtgatccttatgctacgggcagcaaaatagttgatgtgattaaaaaattaattgatgataatattccaatatttggaatatgtttaggccatcaaattttaggattggcattaaatgcaaagactaaaaaaatgtttcaaggccacagaggttcgaaccatcccgtcaaaaatctttcaacaggcattgttgaaattacttcacaaaatcatggttttgaagttgatagagagagttttggcaaagatataattgaaactcatgtttcactttttgaccggactaatgaaggtttaagacataagcatttaccagtatttagtgttcaatatcatccagaggcgtcccctggtccacatgatagtcattatttgtttgaagaattttataaacttatagagaaaaatgccaaaaagaactgac

SEQ ID NO: 319250 - DNA, 703 bp, Unknown
  Bacterial polypeptide expressing nucleotide sequence isolated from the Sargasso Sea
atggcctggttaaatggaatggatcttgctcaagaggtcacaactaataaaacttatatttggaaaggatataaaacttggaaaaaaaataagggttatgaaaaaaataaaaagaaaaaatttagggttgttgcaatagattatggaattaaaaaaaatatacttagatatttctctgattttgactgtgaagttaaggtcgtttcctgcaaagaaaatgccgataacataattaatctaaaacctcatgggatttttttatctaatggtcctggtgatcctgcggcaacaggaaaatatgcaattaaaatagtaaaaagtttaattaaaaaaaatattcctttatttgggatatgtttaggtcatcaaatattagccttagctctagatgcaaaaaccaaaaagatgaaattaggacataggggtgcaaatcatccagtaaaaaatttaattactaagaaagtagaaattaccagtcaaaatcatggatttgaggttgtaaaagaaagtttaaaaaaaaatacagaagtaacacatctgtcattatttgataattctatagaaggaattagattgaaaaataaaccagttttttcagttcaataccatcctgaagcaaatcctggaccacaagatagtaaatatttatttagtaattttattaaagacataaaaaaatatgccaaaaagaaaagacattaaa

SEQ ID NO: 319251 - DNA, 628 bp, Unknown
  Bacterial polypeptide expressing nucleotide sequence isolated from the Sargasso Sea
catggggaaaaagaaaaaggttttaaaaaaaacaaaaagaaaaaatacaaaattattgcaattgattatggaattaaaaaaaatattttaagatatttttctaattataattgtgaagtagttgtagtgccttgtaactttgaggctgtagatattattaaattgaaacctgatggtatttttttatctaatggccctggagatcctgctgcaacaggaaaatatgcaataaatataattcaaagattaattaaaacaaatattccaatatttggaatatgtcttggacaccaacttttagctttagcacttaaagcaaaaacaaaaaaaatgaaattaggtcatagaggtgcaaatcatccagtaaaaaatctaataaatagtaaagttgagattacaagccaaaatcatggatttgaagtagttaaagaaagtttaccaaaaaatgttgagatgactcataagtctctatttgataattctgttgaaggaataaaattaaaaaataaacctgttttttctgttcaatatcacccagagtcaaatcctggtcctcaagatagccattatttatttaatgaatttattaatgaagtaaaaaaaaatgccaaaaagaaaagatattaaa

SEQ ID NO: 319252 - DNA, 781 bp, Unknown
  Bacterial polypeptide expressing nucleotide sequence isolated from the Sargasso Sea
tttaagggtataggactgggatatcaaggagatgcgaccggagaggtttgttttaatacttctttgacaggataccaggagataatatcagacccatcttatgcaggacaaataattaactttacttttcctcatattggaaacgttggaactaacaaagaagatatagagtcggataaaatttggacaagaggtgtaatttttaattcagaaataacaaatccttcaaattacagatctcttaaacatttagatgaatggcttaaaaagaataaaatagttggaataactggtcttgacacaagaagtttaactaattttattcgagataaaggggccccaaaaggaacgatttcaaataataaatcaagaaaatttaatattaagaaactggtcaaaaaaacaattacatggcctggcttaaatggaatggatcttgctgaagaggtatctaccaaaaaaaattatacctgggcaggtctaaagacttggagcaaagaagaaggttataaaaaaaataataaaaaaaaatacaaagttgttgcaatagattatggaataaagaaaaatatcttgagatatttttctaattttgattgtgaggtaaaagttgtttcatgtaaagaaaatcctgacaatttattaaaacttaaacctcatggaatttttttatctaacggtcccggtgatccagcggccacgggtaaatatgctattccaacaattcaaaaattaataaaatcaaatttacctatatttggaatttgtttaggtcatcaaa

SEQ ID NO: 319253 - DNA, 867 bp, Unknown
  Bacterial polypeptide expressing nucleotide sequence isolated from the Sargasso Sea
tgtagagtctgataaaatatggaccagaggggtaatatttaattctgaaataactactccatctaattatagatcatttcaaaatttaaataagtggctaattaaaaataaagttgttggtctgacaggtattgacactagaggtttaacaaattttatacgtgataacggagctcctaaaggaacaatttcagttaataaaagtggaaattttaatattaaaaaattaattaaagacgcggttaagtggcacggtttaaacggattggatctcgcgaaagaagtaacaactaaaagtacttataaatggataggttttaaaacatggaaaaaaggagttggctataaaaggtcaattaagaataaattaagaatagttgctttagattatggaataaagaaaaacatactaagatatttttcagattatagttgtgaagtaaaagtcgtgtcgtgtaacttatcggcaaacgaaatccttagatataaaccccagggaatatttttatcaaatggacctggagatccggcagctacaggtaaatatgcaattccggtaataagggatttaattaaaaaaggtgttccaatatttggaatatgcctaggacatcaactattaggactggctttaaatgctaaaacaaaaaaaatgaaattaggacacaggggtgcaaatcatccagtaaaaaatcttttaagcggtaaagttgaaataacaagtcaaaatcatggttttgaagttactgaagatagtttaccgaagaatgtacaagtaacacacaaatcattatttgataattcaatagaaggtttaaaattaattaataaacctgttttttcagttcaatatcaccctgaagcaaa

SEQ ID NO: 319254 - DNA, 523 bp, Unknown
  Bacterial polypeptide expressing nucleotide sequence isolated from the Sargasso Sea
tttaattgtaaagttacaatcgtaccatgtaagtcaagtgcaaaagatattctaaaactgaaaccaaatgggatattcttatcaaacgggccaggggatcctgctgctactgggaaatacgctataccaataattcaagacttaatcaaaaaaaaattaccattatttggtatctgtttaggtcatcaaatgcttgccttagcacttggtgctaagacagaaaaaatgaaattaggccatagaggagctaaccatccggtcaaaaatttagttgagggtaatgttgaaattactagtcagaatcacggttttgaagtagtgaaaaaaaatttacctaaaaatataagagttactcaccagtctttatttgacaacagtattgagggaattgaattaaaaaataagcctgttttctcagttcaatatcatccagagtctaaccctggcccacaagatagtgtttatttatttgataaatttgtaaagagtatgaaaaaaaatgccaaaaagaaaagatattaaa

SEQ ID NO: 319255 - DNA, 671 bp, Unknown
  Bacterial polypeptide expressing nucleotide sequence isolated from the Sargasso Sea
ggaagttacaacaccgaaaacttatacttggaaaggattaaaaacttggaaaaaaattaggggttttgaaaaaaataaaagaaaaaaatttaaaattgttgcaatagattttggaataaaaaaaaacatacttagatatttttccaattatgattgtgaagttaaggtcgtatcatgcgcaacaaattcagatgaaatttttagactgaaacctcacggtatttttttatcaaatggtccaggagatcctgctgcaaccggaaaatatgcaattgatattgtaaaaaacttagtacaaagtggaatacctttattcggtatttgtttgggtcatcaaatattagcgcttgctctagaagcaaaaacaagaaaaatgaaattaggacacagaggtgctaaccaccctgtaaaaaatttaataactaataaagttgaaataacaagtcaaaaccatgggttcgaagtaattaaagaaagtttaaagaaaaatactgaaataactcacatatccttatttgataattctattgaaggtataagattaaaaaataaaccagttttttccgttcaataccatccagaggcaaacccaggtccccaagatagcaagtatttattttatcattttatgaaagatgtaaaaaaatatgccaaaaagaaaagatattaaa

SEQ ID NO: 319256 - DNA, 669 bp, Unknown
  Bacterial polypeptide expressing nucleotide sequence isolated from the Sargasso Sea
tatgtctaatttaaaagccttattagcattagaagatgggactatatttgaaggcaaaagtataggagattctggaaaaacaaacggagaaatagtgtttaacacctccatgacgggttaccaagaaattctcactgatccttcttatgcgaaacaaatagttactttaacttatcctcacattggaaatacaggtgttaatcatgaagatgttgagtctgatgctatatggtgctcaggattagtcatccgctctaattctctcttagaaagtagctggagaagcgaagactctttaacaaactatttaaaagcaaataatattttgggcatttctgatatagataccagaaagttaactagattaataagaacaaaaggagcccaggcagcttccattatagcttctgaaaatattaataaagatgaagctatacatgaagctagaaaatttaaaggactggctggaatggatttagctcaagaagtaacaactccgaatagttatgcttgggatacaggggtatggagagagccaaataagaaatctaaattaaaagttgtcgtccttgattttgggattaagcagaatattcttaggattcttgctggtagaggttttgatttgaaaattgttcctgcaaaaactaatataaatgagatattaaa

SEQ ID NO: 319257 - DNA, 881 bp, Unknown
  Bacterial polypeptide expressing nucleotide sequence isolated from the Sargasso Sea
gaaattagttttaagtaatggaattgttttcccgggattctattttggtgcttctggtacagcaattggtgaaatagtttttaatacgggaatgaccggatatcaagaagttattactgatccaagttattatgggcagataataacttttacttatccagagattggaaatactggtattaattttgaagattcagaatctgatattaatgttaaaggaataattgttagaaatttttcttctaataacagcaattggagatctaacaagaattttgatcaatggttagttgaaaaaaacattataggtctatacggaattgatacaagggctcttgttaaaattttaagatctaatggtgcgatgaatggagttattacctctcttgataaaactgatgaaagttgtttaaagataattcatgatacgccaaagatggagggattaaatttatcaaaagtagtttcaacaaagcaacaatatttgtggaaaagtcatacacaaacaatttttgatttaagaaaaagatatcctaaatcgtcaaaaaaattaagaatagtagcaattgattttggaataaaaaattcaattttaaatagacttgtatcccatggttgtgaagttttggttttaccagcacgatcttcattaaaagatgttctttctagcaagcctgatggtatatttttctcaaatggcccaggagatcctgcttctgtttctggagggatagatttggcaaaatcacttattgaaaatggtgaaatacctatgtttggtatatgtcttggccaccaaatatttggattagcattaggaggctcaacgtataaattatcttttgggcatcgaggtttaaatcatccttgtggtgaaaata

SEQ ID NO: 319258 - DNA, 757 bp, Unknown
  Bacterial polypeptide expressing nucleotide sequence isolated from the Sargasso Sea
ggtatagagggaaccagtttcggggagatttgttttaatactggtatgactggttatcaagaaatatttactgatccgtcatattttgggcaaattatggtcactacaaactcccacataggaaattacggaactgttggttttgacgatcaatcctctagtccaaagatttcaggacttgtatgtaaaaatttcagttttaattattctagacctatcgcttctgaatctttagaaaattatttttctaaaataaatatggttgttatatctgatgttgatacgagagcattagtaaattatattagggagaatggagctatgaacgctgcaatttcaacacaagacaaaaatattgaattgattaaaaatgagttaagtaaatttccttctatggacggtttagaattagcatctaaagtttcaacacaaaaaagttattactacgggaagttaaattcaaaatataaggtagctgttttagatttgggagttaagaaaagtatacttgaaaatatatctaaaagaggggcttatcttaaaattttcccttataacacatcttttgaagaaatggataaatggtctcctgatgcttattttatttcaaatggacccggagatccaaaacctctaatagatgctcaaattactgcaaaaaaaattattagtaagaatattcctttatttggaatctgtttaggtcatcaaattattgctttagctaatagtataaaaacatataaaatgtttaatg

SEQ ID NO: 319259 - DNA, 576 bp, Unknown
  Bacterial polypeptide expressing nucleotide sequence isolated from the Sargasso Sea
aaagttctaaacttaaagttgtagcaatagattatggaattaagaaaaatatattaaactgcttactagatttaaatttagaagttattttagtaccagctaaaacttctgtcgaaaaaatactttcttatagtcctaatggcatttttctttcgaatggtccgggtgatccaaaagcaacaggaaaatacgctattccaattataaaaaaacttatcaaatcaagaatcccattatttggaatatgtcttggtcatcaacttatttctttagcattaggggcaaagacaaaaaaaatgtttcaaggtcacagaggggccaatcatccagttaaaaatcttgaaacggaaaaagtagagatcacatctcaaaaccatggttttgaagtaactgaaaaatctattccaaaagatgtgaaaataactcataaatcattattcgatggaagcattgaaggtataagaaaaggaaaaaatatttttgcagtgcaatatcaccctgaagcaagcccaggaccgcacgatagtcattacctttttcaagaatttaaaaaaatgattaatcaaaatgcctaag

SEQ ID NO: 319260 - DNA, 356 bp, Unknown
  Bacterial polypeptide expressing nucleotide sequence isolated from the Sargasso Sea
tgtatttggtatttgtttaggtcatcagatattagctttagcattaggagcaaaaacagaaaaaatgaagctaggccatagaggtgcaaaccacccagtaaaaaatttaataaaaggtaatgttgaaataacaagtcaaaaccatggatttgaagtaattaaaaaaaaccttccaaagaatatcttgattactcatcaatctctttttgacgatagcattgaaggaattgaattaaagaataaacccgttttctcagttcaataccaccccgagtctaatcctggaccacaagatagtgtttatttatttgaaaaatttgtgaaaagtatgaaaaaaaatgccaaaaagaaatgat

SEQ ID NO: 319261 - DNA, 601 bp, Unknown
  Bacterial polypeptide expressing nucleotide sequence isolated from the Sargasso Sea
atgattaatctatataagaaaaacgcgaaattagtattaagtaatggaattgtattcccaggattcttttttggtgcttctggtacagccattggtgaaatagttttcaatacgggaatgaccggatatcaggaagttattactgatccaagttattttggacaaatattaacattcacttatccagagattggaaatactggtattaatttcgaagattcagaatctaatattaatgttaaaggaataattgttagaaatttttcatctaatagcagtaattggagatctaaaaagaattttaatcaatggttagttgagaaaaaaatcataggtctatatggaattgatacaagggctcttgttaaaattttaagatctagtggtgctatgaatggagttattaccaacctagatacaagtgatgaaagttgtttaaaaataattcaggatacgccaaagatggagggattaaacttatcaaaagttgtttcaacaaagcaacaatatttatggcaaagtcatacgcacacaatttttgatttaagaaaaagatatgatgaatcttctaaaaagttaaaaatagtagcaattgattttg

SEQ ID NO: 319262 - DNA, 496 bp, Unknown
  Bacterial polypeptide expressing nucleotide sequence isolated from the Sargasso Sea
atgcaaaaagcaaaaattgtacttgaagatggaactttttttaaaggatccgtatttgctggattaggtgaagcatacggtgagcttgttttcaatacttctatgaccgggtatcaagaaattttaagtgatccctcctattatggacaaattattactcttacttatcctcttattggtaattatggagttaacaatgaagataatgaatcaaaaggaatatttgcctctggattaataatcaatgaatactcaagaaattatagtaactggagggcagaaaaatcgttagcaaaatatttagaagaccacaataagataggaattcatgaagtagatactcgagctataactcttcatattagagataaaggtgcaatgaaatgcataatcacaacaaatgatgaaagtgttgagtccttaataaaaaaagtaaaaaaatcaaaaggactcattggaaatgatcttgctagtgaagtaactacaaaagaaatat

SEQ ID NO: 319263 - DNA, 775 bp, Unknown
  Bacterial polypeptide expressing nucleotide sequence isolated from the Sargasso Sea
tagtggtggatttgatgttagaaatataacaaaatatctgagagacaatggttcgagtatgtttgcactcggtattgatgttgatataaaagatttaaaagaaattttatcaaaagcaaaaaatattcttggtgatagttcagcaatgactgcaggtaaccagaataataaaaacattccaactgagggaaagattggaattatagatcttggagctaaaagaagcattataaaagtgcttgaagaccatgattacagagttgtaatgatcccacccaatacaacatcaaatgagatattaaaaatgaatcttaaaggtcttttgatttcaaacggaccaggtgaccctagatcattactatcagtgattaatacagttcagaatcttataggaaaactaccaatatttggaatttgccttggtcatcaaatacttggtttagcatgcggtctcaatgttaaaaaaatgcaatttggtcatcatggttctaatcatccagtagaaattgagggttcaaaaagagcattaattactgctcaaaatcatggtttttcaattgaagattttggtgattcaatcaaacatgaaatttttggggatataaatgtttatgcaacaaatttaaatgatggaactaatgcaggaatcagtatttgggactctatggcgtactctgttcaatttcatcctgaatctggacctggtacaactgatggattgcaaatttttaaccctttttttgaaatgattgagaaaaactatgccaaaaaataa

SEQ ID NO: 319264 - DNA, 227 bp, Unknown
  Bacterial polypeptide expressing nucleotide sequence isolated from the Sargasso Sea
tatggaggtcgcgttgacaaagtctgccttactcgtactcgaagatggaaccgtattcactggcacagcaattggtgccgatggtctctctgttggtgaagttgtttttaacacttccatgacaggataccaagaaatttttactgatccctcttattcacgccaaatagtaacttttacctacccccacattggtaacactggtaccaataatgaagacgtcgaat

SEQ ID NO: 319265 - DNA, 148 bp, Unknown
  Bacterial polypeptide expressing nucleotide sequence isolated from the Sargasso Sea
ttgtttgataaatccctgcagggtattcatcgtatcgacaaaccggcgttcagcttccagggtcaccctgaagcgagccctggtccgcacgatgcagctgcattatttgatcactttatcgacttaatcgaacagtcaaagcagtagg

SEQ ID NO: 319266 - DNA, 463 bp, Unknown
  Bacterial polypeptide expressing nucleotide sequence isolated from the Sargasso Sea
aactaaagcgcatgagatcctatcttatgacccagatggggtgtttctatcgaacggacctggagatcctgcagctgttggatatggtattgagacaataaaaaaactcctaggagtgaagccaatatttggtatatgtctagggcatcaattactagctcttgcgctaggggcaaaaacattcaaactaaaatttggacatcgtggcataaatcatcctgttaagaatattaacttgggaacgattgaaatcaccagtcaaaatcatggctttgcagttgaacttgatagtttaccaaaaaatatattgtctactcatattaatttgaatgataatacctctgcgggaatcgagtgtgttgatcatcctgctttttcagttcaatatcacccagaatcaagcccaggcccacatgatagtcgttatctattcaaaaaatttattggaatgatggatgcctaa

SEQ ID NO: 319267 - DNA, 805 bp, Unknown
  Bacterial polypeptide expressing nucleotide sequence isolated from the Sargasso Sea
atgacagaagaagcagttttagctttagcagatggaacaatatttagaggtaagagtatcggtgcttctggtcgtataaacggcgaaatagtttttaatacctccatgacgggctatcaagagattttaactgatccttcatacgccaaacaaatagtaactttaacctatccacacataggcaatacaggtgtaaataaagaggatattgaatctgaaaatatatggtgttcaggactcgttataagatcaaactctcaattagttagtagctggaggagtgaagattcattaactgaatatttaaagaaaaataagatattaggaatttctgatatagataccagaaaattaacaagattaattagaacaaaaggcgcacagtcagcctctatccttgtatctgaagatttaaatgcagatgaggcaatagaagaagctagaaaatttgaaggtttagctggattagatctagcaaaaaaagtaacaactgctaaaagttattcttgggaagaaggcgtttggagggaacctaaaagtaattctaaactaaaggttgtagcagtagacttcggcattaagcgtaatattttgagaattctctctggcaaaggttatgatttgactgttgttccagccaaatcaacttcgcaagatattctagatctaaagccagacggagtcttcctgtctaatgggcctggtgacccagagccatgtgattacgctataaagacaataagagaactttcttctgagaagattccattatttggtatttgtttgggacatcaacttttagcgc

SEQ ID NO: 319268 - DNA, 124 bp, Unknown
  Bacterial polypeptide expressing nucleotide sequence isolated from the Sargasso Sea
cttcgacatcccggctttcagcgtgcaataccaccccgaagccagtccgggtccccacgattctcgatatttatttcgagagtttgccgacctgatgagcgcttttgagggagcgtcaagctga

SEQ ID NO: 319269 - DNA, 763 bp, Unknown
  Bacterial polypeptide expressing nucleotide sequence isolated from the Sargasso Sea
atatctttttacaacaaaaataaattaaatattaaaaaactaattaaaataactaataaatggagtggccttaaaaacttagatttggcaaaaatggttactactaagaagaattatttgtggcaagattataaaacatggaaaaaggaaagtggatatttaaaaaataaaaaaaaaatattgcatgtggtagctatagattatggaattaagaaaaatattttaagatatttttcagattttaattgtaaagttacaattgtaccatgtaaaacagacgtaaaagatattctaaaactcaagcctaatggaatatttttatcaaatggacccggagatcctgcggcgacagggaaatatgcaataccgactattcaaaaattaatcaaaaaaaaattacccttatttggaatctgtttgggccatcaaatcctagctttagcacttggtgctaagacagaaaaaatgaaattaggacatagaggagctaaccatcctgttaaaaatttgattgagggcaatgttgaaattacaagtcagaatcacggatttgaagtagtaaaaaaaggtatgcctaaaaatataagagttactcaccagtctttgtttgacaacagcattgagggtctcgagttaaaaaataaacctgtcttctcagttcaatatcatccggaatccaaccctggtcctcaagatagcatttatttatttgataaatttgtgaagagtatgaaaaaaaatgccaaaaagaaaagatattaaa

SEQ ID NO: 319270 - DNA, 1000 bp, Unknown
  Bacterial polypeptide expressing nucleotide sequence isolated from the Sargasso Sea
cacagctcgacctaaacctattcatgggcagcttatcctggaagatggctcagtatttaatggcataaagattggttcatctaacatggaaataggtgaagtttgcttcaatacttcaatgacaggataccaggaaataataactgatccttcatatgcaggacaaataattaattttacttttcctcatattggcaatgtaggcactaaccttgatgacaatgagtcaaaaaaaccgtttgcaaaaggaataatcattaattgtgatatttctgatccctctaattataggtctattcttcatcttgatgattggctaaaaaaaaataatgtacctggcatatgtaatattgatactagactaattacaaatagagtgcgttctaaaggtgcgccaaaaggcggcataatagaaggtccaataaataataaaaaaactgccaactgcttaaaaaaaataaaacaatggaagggtctaaacggactcgatcttgctatagatgtgtcacgcaacaatataaaaatttataaatctaaaactaaatcagaattaaaagttgtagcgatcgattatggaattaagcagaatatattaaattgtttattaaatttaaatattgaagtaattttggtgccagctgaaacctcagctgaaaagatactttcctatgacccaaacggtatctttctatcaaatggtccaggtgatcccaaagcaacaggaaaatatgctattccaataataaaaaaacttattaaggcaaagattccaatttttggaatatgtcttggtcatcaactgatttctctagctcttggagcaaaaaccaaaaaaatgtttcagggtcacagaggagctaatcatccagtaaagaatcttgaatccaaaaaagttgaaattacttcacaaaatcatggttttgaagtcactgagaaatcaatacctaaagggggtaaaataactcataaatcattattcgatggaagtatcgagggtata

SEQ ID NO: 319271 - DNA, 234 bp, Unknown
  Bacterial polypeptide expressing nucleotide sequence isolated from the Sargasso Sea
gatgattaatccatataagaaaaacgcgaaattagttttaagtaatggaattgttttcccaggattcttttttggtgcttctggtacagctattggtgaaatagtttttaatacgggaatgaccggatatcaagaagttattactgatccaagttattatggacagctattaacatttacttatccagagattggaaatactggtattaattgtgaagattcagaatctaatat

SEQ ID NO: 319272 - DNA, 812 bp, Unknown
  Bacterial polypeptide expressing nucleotide sequence isolated from the Sargasso Sea
cgatgaagatgaggaatctgataaaatctgggccaaaggccttattatccgtgaccttcctttgttagccagtaatttccgtaatcaagcctctcttagtcaataccttagctcccgtaatattttaggcatcgccgatatcgacacccgtaaactgacccgtattctgcgtgacaaaggcgcacaaaatggctgcttaatggctggtgataacttagacgaaaacaaagctttagagttggcgcgtgctttccctggtttatctggtatggatttagccaaagaagtttcagtcaaaaagtcctatcaatggactgaaggtagctggaatttaggtcagggctttgccaaaccagataattcagcctttcatgtcgttgcctacgattttggtgtgaaacgtaatattttacgtatgttggctgaccgcggttgtcgtttaactgtagtcccggctcaaacgccagctgaagaagtattagcgctgaatcctgacggtattttcttatctaatggccctggcgatccggcgccttgcgattacgccattaaagccatcgaaactttcctgactactgatattcctgtgtttggtatttgtttaggtcaccaattactggcattagccagcggtgctaaaacagtcaaaatgacagtaggtcaccatggtggtaaccatccgggtgaaaatctggatacaaacaaggtgttaatcacagcgcagaaccacggttttgcggtggaagaagccacattgccagccaatttacgtgcgactcacaagtcgttgtttgatggtactttgcagggga

SEQ ID NO: 319273 - DNA, 877 bp, Unknown
  Bacterial polypeptide expressing nucleotide sequence isolated from the Sargasso Sea
attatatctgatccttcttatgcaggacaaataattaacttcacttttccacatattggcaatgttggaacaaataatgaagatatagagtctgacaaaatttggactagaggagtaatttttaactcagaaataaccaatccatcaaactatagatctcttaaacatttagatgaatggttaaaaaaaaataaaattgttggtattaccggtctcgatacaaggagtttaacaaattttataagagataaaggtgctccaaggggtaccatttcaaataacaaatctggaaaatttaatataaaaaaattgattaaaaaaacaacaaattggcctggtttaaatggaatggatcttgctaaggaagtatcgactataaaaaattataattggaaaggtttaaaaacttggaacaaagaacagggttataaaaaaaataacaaaaaaaaatatagagtaattgcaatagattatggaattaaaaaaaatatattaaggtatttttctaactttagttgtgatgttcgagttgtttcatgtaaagagaatgttcaaaatatacttaaatataaacctcatggaatatttttatcgaatggtcctggagatcctgccgcaacaggcaaatatgcgataccaatagttcaacaattaataaaatcaggtttacctgtatttggaatatgtttaggacatcaaattcttgcactcgcattaaatgcaaaaacaagaaaaatgaaattaggacatagaggtgcaaatcatccagttaaaaatttaatttcaaaaaaagtggaaattacaagtcaaaatcatggtttcgaagttttaaaagaaagtctgccaaagaatatgcaattacacacaaactcttttt

SEQ ID NO: 319274 - DNA, 451 bp, Unknown
  Bacterial polypeptide expressing nucleotide sequence isolated from the Sargasso Sea
aatatttttatcaaatggccctggagatccagctgctacaggaaagtatgcgataaatataattcaaaaccttattaaaaaaaacattccaatatttggcatttgtttaggtcaccagattcttgctttagcacttggtggaaaaacaaaaaaaatgaagttgggtcatagaggtgcaaatcatcctgtaaaaaatttaattcatgacaacgtagagatcactagtcaaaaccatggcttcgaagttgttaaagaaactttaccaaaagatattgaagtcactcataaatcattatttgataatagtattgagggtattaagttaaaaaataaaccagtattttcagttcaatatcaccccgagtctaaccctggaccacaagatagtgtctatctatttaaagaatttattaacaatatgaaaaaaaatgccaaaaagaaaagatcttaa

SEQ ID NO: 319275 - DNA, 540 bp, Unknown
  Bacterial polypeptide expressing nucleotide sequence isolated from the Sargasso Sea
gtggcaaaagagctattttcaatcaattgtctgaaagatttgatcttgagatagtaccctgcacggaatctgcagaagcagtattagataagaatccaaatcttgtttttttatcaaatgggccaggagatccttctgctttagactatgtaatctctaatattaaaaagattctggggaagataccaatagttgggatttgtttaggtcatcaaatcttagcacaggtattaggggggaaaacttataaattaaaatttggccatcatggcgtaaatcatcccgtaagaaaaacttcaggtagacaggtcgatataacttctcaaaatcattctttttctgttgatctgaatactttgcctaagaatgtagaggtaacacatttaaatttaaatgatatgacttgcgagggattaatttcagaagaattaagagtgtgtagtgttcagtatcatcctgaagcatcacctggtcctcatgatgcaagaaaattgtttgattatttctttgatttttgtttgcctgattataagccctaaa

SEQ ID NO: 319276 - DNA, 426 bp, Unknown
  Bacterial polypeptide expressing nucleotide sequence isolated from the Sargasso Sea
atccagcagcaacaggaaaatatgcaatagaaatcctcaataaattaatcaaaaaaaatttacctatatttggaatttgtttaggtcatcaaattttagctttagcattaggtggtaagacaaaaaaaatgaagttgggccatagaggagcaaaccatcctgttaaaaatttaatccttgataaagttgaaatcactagtcaaaatcatggttttgtagtagttaaggaaaatttacctaaaaaaattgaagttactcataaatccctttttgataacaccattgaaggaataagaattaaaaacaaaccaatattttcagttcagtatcatccagagtcaaatcctggaccacaggatagtgtctacctatttcaagactttattaacaacatgaaaaaaaatgccaaaaagaaaagatattaaa

SEQ ID NO: 319277 - DNA, 626 bp, Unknown
  Bacterial polypeptide expressing nucleotide sequence isolated from the Sargasso Sea
tttgaaaaaaaatacaggatttgaaaaaaataaaaaacgaaaatttaatattgttgcaatagattttggaataaagaaaaacatacttagatatttttctaattatgattgtgaagtgagagttgtctcatgcaaaaaaaaatcagatgaaatttttaaactaaaaccccacggtgtttttttatcaaatggtccaggagatccagctgcaactgggaaatatgcaattagtgttgtaaaaaatttaatacgagggggtatgcctttatttggtatttgtttaggacatcaaattttagcgcttgctttagacgcaaaaacaagaaaaatgaaattaggacacagaggtgctaatcatccagtaaaaaatttaataactaacagagttgaaataacaagtcaaaatcatggtttcgaagtaataaaggaaagtttaaaaaaaaatactgaaattactcatttatctttatttgataattctattgaaggtattagattaaaaaataaaccagttttttctgtacaatatcatccagaggcaaacccaggtccacaagatagtaagtatttatttaaccatttcataaaagaagtaaaaaaatatgccaaaaagaaaagatattaaa

SEQ ID NO: 319278 - DNA, 502 bp, Unknown
  Bacterial polypeptide expressing nucleotide sequence isolated from the Sargasso Sea
tatggatcggtatttgatacttgaggatggaacaatgtttgaagggttggcttttggaggcaacgctgaaaacagtggagaaatggtattcaacacaacaatgactgggtatcaggaggtgttgactgacccttcctattcaggccaaatcgttaatatgacctatccattgataggcaactacggcatcaatctgtctgattcagagtcttctaaaattcaggtatccggtatgttggtccgagagctctgcgatacccctagtcattcgttgagtgtagacacgctggataattttatgaagcaccaagatatcccaggaatcagaaacctagataccagggcaatagcaagaaaaattagaacaagtggcgtaatgcgaggactgttgacgaacagtgcagatttgtctgcaggactacacactttagaaaatatggatgcttacgaaaatataaattttgtaaatggggttagtacagatgaaatcacagttatgcca

SEQ ID NO: 319279 - DNA, 685 bp, Unknown
  Bacterial polypeptide expressing nucleotide sequence isolated from the Sargasso Sea
acttagatttagcaaacaagtttctactaaaaagaattatttatggcaagactataaaacttggaaaaaagagaatggatatttaaaaaataaaaaaaaattattacacgtagttgcaatagactatggaattaagaaaaatattttaagatatttttctgattttaattgcaaggttacaatcgtgccatgtaagacaactgcgaaagatattcttaaacttaatccagatgggatattcttatcaaacggaccaggtgatcctgctgcaaccggaaaatatgcaataccgataattcaaaatttaataaaaaaaaaattaccattatttggaatctgtctaggtcatcaaatgctagctttagcacttggcgcaaagacagagaaaatgaaattaggccatagaggtgctaaccatcctgtaaaaaatttaatagagggtaatgtggaaataacaagtcaaaatcatggatttgaagtaataaaaaaaggtttgcctaaaaatatacgagttactcaccagtctttatttgataatagtattgagggtattgaattgaaaaataaacctgttttctcagttcaatatcatccagagtctaaccctggtcctcaagatagtgtttatttatttaataaatttgtaaagagtatgaaaaaaaatgccaaaaagaaaagatattaa

SEQ ID NO: 319280 - DNA, 891 bp, Unknown
  Bacterial polypeptide expressing nucleotide sequence isolated from the Sargasso Sea
aaaaattcgcaaattaatacaggtattttagttcttgaaaacaaaaaggttttcatgggtgttggaattggttatcaaggagaagcgaccggtgaagtttgctttaatacttccttaacaggttatcaggagattatatctgatccatcttatgctggccagattattaattttacttttccacacataggaaatgttgggactaacgaagaggatcatgagtctgataaaatttgggctagaggtgtaatattcaattcagaaataacttcgccctcaaattataggtcttttttgcacctggattcatggcttaaaaaaaataaaatcgtcggaattactggtttagatacaagaagcctcacaaactttattagggataaaggtgctcctaaaggaacaattagttttttaagaaatggtaaatttaatattaaaaaattaacaaatactacaacgaaatggagtggattaaaaaatttagatctcgcaaaaacagttacaactcaaaaaagttatgtttggaaaggtttaaaaacttggaaaaaaaacgttggatataaaaaaaataacaaaaattcttttcatgtagttgccattgattatggcattaaaaaaaatattctaagatatttttctgactttaattgtaaggtgactgttgtatcttgcaaaacatctgctaagaaaatattaagtttaaaacctcatggtgtatttttatcaaatggtcctggtgatcctgctgcaaccggagaatatgctttaggaatacttaaaaaaattatcaaaaaaaatttaccaatatttggtatttgtttggggcatcaaattttagcattagcttcgggtggtaaaacaaaaaaaatgaaattaggacatagaggtgct

SEQ ID NO: 319281 - DNA, 790 bp, Unknown
  Bacterial polypeptide expressing nucleotide sequence isolated from the Sargasso Sea
gtcggaactaacaaagaagattttgaatctgataaaatatggactagaggggtaatttttaattcagaaataacctcaccatcaaactatagatcttttcaacatttagatgcttggcttaaaaaaaataaaattgttggaattacgggtttagatactagaagtttaactaattttataagagataaaggtgctcccaaaggaactattgcttttttaaaaaatggtaaatttaatatcagcaaactaactaatttaacaataaaatggaatggattaaaaaatcttgatcttgcagaaaaagtaagcacaacaaaaaattatatatggaaaggacttaaaacatggaaaaaagagacaggttataaaaaaaataataaaaatttttttcatgtagtagcaatagattatggaataaagaaaaatattttaagatatttttctgactttaattgtaaagttactgtagtttcatgcaaaacttcagctgaaaagatattaaatctaaaaccaaacggaatatttttatctaatggacctggagatccagcggcaactggtaagtatgcaataggaataattagagaatttataaaaaaaaatttaccaatctttggtatttgtttaggtcaccaaattcttgctctcgctttaggtggtaaaacaaaaaaaatgaaattaggtcatagaggtgcaaaccatcctgttaaaaatttaatcgatgataatgtagaaatcacaagtcaaaatcatggttttgaagttgttaaagaaaatttacctaaaaata

SEQ ID NO: 319282 - DNA, 778 bp, Unknown
  Bacterial polypeptide expressing nucleotide sequence isolated from the Sargasso Sea
atcttaaaaaaaataaaattggttggtattaaagaaattgatacccgttctctaacaaggcacataagagatagaggtgcaatgaatggtatcatctcatctaatgatctaaacatacaaagcttagaaaaaaaattaaaaaaatctccggatatgaatgggttggatttagcgaaagatgttacaactcaaaaaaaatataaatggccaggaaaaggggaatataaagttgctgttattgattttggtattaaaaaaaatattttacgccttctatcaaatgcagggtgcgagcttacagtttttccagccagcattaaagccgaggatattttttcatttgaaccagatggtgtttttttgagcaatgggcctggtgatcctcttgctgttacttatggaattgaaactgttaaaaaattattaggaaaggttccattatttggaatttgtttgggacaccaaatattagctcttgcgcttggagcatcaacttttaaattgaaatttggacacagaggcataaatcatccagtaagaaacaatgaaaaaaatacagttgaaataacgagccagaatcatggatttgcggttgatctcgattcgttgcctcctaacgtgatttctactcatattaatttaaatgacaatacctctggaggaattcgttgcaccgatattcctgctttttcagtacagtatcatccggagtcaagccctggtccgcatgacagcagatacttatttaatgaatttattgagatgatgaatgcctaaa

SEQ ID NO: 319283 - DNA, 820 bp, Unknown
  Bacterial polypeptide expressing nucleotide sequence isolated from the Sargasso Sea
aaatcctgaggacaatgaggcagataaagcatgggttaagggcgtaatatttaattcaaacgttaccgaaccttctaattacagatcaattaaaaagcttgatgagtggcttaagaaaagaaagattgtaggaattgtagggctagatacaagggtaattacaaactatattagagataaaggtgcacccaaaggtatcattcagttttcaagaaaaggtaaacacaattttaaagagctcttaaaaaaaacaaaatcttggagtggccttttaggtctggacttggcaaaaaaggttacatgtaaaacaagttataaatgggcatctttaaagtcatgggacaaagataaagggtataaaaaaaataaaaggaacaaatataaagtgattgccgtagattatggtattaaaaaaaatcaactcagatgtttttcagatttaaattgtgctgtaactgttgtgcctgctaattaccctgctgaaaaaataatcaaacttaatcctgacggagtttttttatctaatgggccaggagatcctgctgccactgggaaatatgcaattccaattataaaaaaacttataaataataaacttccaatatttggtatttgccttggtcatcaattgttatctcttgctttaggtgcgaaaacaaaaaaaatgtcacttggtcatagaggtgcaaatcatccagtaaaagatttaactacaaataaagttgaaattacaagtcaaaatcatgggtttgaggttgactctaaatcaatacctacttcagtaaaaattacacataaatctttgttcgatggatctata

SEQ ID NO: 319284 - DNA, 895 bp, Unknown
  Bacterial polypeptide expressing nucleotide sequence isolated from the Sargasso Sea
aaaggctgccgtaggagagctttgttttaatacctctcaaacaggttatcaagaagcattatcagatccctcatatacaaaacaaatcattacatttacttttccacatgttggaattgtaggtacaaatcaagaagatcaggagtcaaaaaaaatctacgctgatggttgtgtaattaatcagccattatcagagtattcaaattggagagcagaaaatgacttaaattcatattttttaaaaaacaaaattccatgtatttttggaattgatactaggtacttaactaagaaattatctattgagggagctaagaaggctgcgattattcactttggagaagatgaaaataaaattgaaaaacttaaaactcaaataaatgcgtggaaaggtcttcaaaatttagatttggcggggatagtatcgacagaacaaaactataattggaaaaaaggaatatggaaaagtgataaatcaattaaaggccaatttaaatataatgtcacttgcttagactttggtatcaaaaataatattttaagaaatctaaatgaatttaatcttaacccaacggtattaaatttattttctagctacgaagcaataatagaaactaatccttcaggaatttttttatcaaacggccctggtgatccttatgccacaggtagcaaaatagttgatgtgataaaaaaattaattgatgataatattccaatatttggaatatgtttagggcatcaaattttaggattggcattaaatgcaaagactaaaaaaatgtttcagggtcacagaggttcaaaccatcccgtcaaaaatcttacaacaggcattgttgaaattacttcacaaaatcatggctttgaagttgatagagatagtttggcaaag

SEQ ID NO: 319285 - DNA, 405 bp, Unknown
  Bacterial polypeptide expressing nucleotide sequence isolated from the Sargasso Sea
atgcaattaatattataaaaaaattaataaaatcaaattatccaatttttggaatttgccttggacatcaaattttagctttagctttaaatgcaaaaacaaaaaaaatgaaactaggtcatagaggtgccaatcatccagtcaaaaatttaataaataattcagttgagatcacaagtcaaaatcatggatttgtagtgatagaaaaaagcttacctaaaaatatacaaataactcataagtcactttttgatgatactattgagggaattaggttaaaaaacaaacctgtgttttctgttcagtatcacccagaggcaaatccaggccctcaagatagtcaatatttgttcaacaactttattcaagatgtaaaaaaatatgccaaaaagaaaagacattaaa

SEQ ID NO: 319286 - DNA, 646 bp, Unknown
  Bacterial polypeptide expressing nucleotide sequence isolated from the Sargasso Sea
tcgtggcaagattataaaacttggaaaaaagaaaatggatatttaaaaaacaaaaaaaagatactgcatgtggttgccatagattatggaattaagaaaaatattttaagatatttttcagattttaattgtaaagttacaatcgtaccatgtaacacaagttcaatagatattttaaaattgaaccctgacggtatatttctatcgaatgggcctggggatcctgctgcaactggaaaatatgccattccgataattcaagagttaatcaaaaaaaaattaccattattcgggatctgtttaggtcatcaaatacttgctttagcacttggtgcaaagacagaaaaaatgaaattaggccatagaggagctaatcaccctgttaaaaatttagtagagggaaaggttgaaatcacaagtcagaaccatggatttgaagtagtaaaaaaaggtatgcctgagaatataagagttactcaccagtctttatttgataacagtattgagggtatcgagttaaaaaacaaacctgttttctcagttcaatatcatcctgagtctaaccctggaccacaagatagtgtttatttatttgataagtttgtaaagtgtatgaaaaagaatgccaaaaagaaaagatattaaa

SEQ ID NO: 319287 - DNA, 778 bp, Unknown
  Bacterial polypeptide expressing nucleotide sequence isolated from the Sargasso Sea
catggttacaactacctcccatataggtaattatggtataaaagaaaatgagtcacaatcagaaaagatatatatatcaggacttatatgtaaaaactttagttattttaattcaagagtatcttcaaactctgttgactcatggttcaataaacagaagttaattgcgatatcagatgttgatactagggctttagttaggtatataagagagaatggtgcaatgaatgcggcaattactactgatattaatgatatagataaattaaagaaaagattaattaattcgcctgaaatggaaggtctagaattagcttcaaaggtttcaacaaaaaaggcttattttctaggtaattcaaaagctagatatagacttgctgttttagatcttggagttaaaaaaaatattctatcaaactttattgatagaggtttttatataaaagtttttccatatgatactaattttgacgaattgattaaatttaaaccaaatggattttttctatcgaacggaccgggtgatcctaaacctttatcaaaagttatagagactacaaaagaaataattaagaataactatcctctttttggaatttgtcttggtcatcaagtgatagctttagctaatggaattaatacttataaaatgtttaatggtcacaggggaattaatcatccagttttaaatttaaagacaataaaaggtgagataacctctcaaaatcatggttttgcagttgattttaaagaagctaagaaaaacaaaaaagtttta

SEQ ID NO: 319288 - DNA, 872 bp, Unknown
  Bacterial polypeptide expressing nucleotide sequence isolated from the Sargasso Sea
aacaggataccaagaaataatatcagatccttcttatgcaggacaaatcataaactttacttttcctcacattggaaatgtaggaaccaataaggaagattttgagtctgataaaatatggaccaaaggtgttatctttaattcagagataacttcaccatcaaactatagatcttttcagcatttaaatgcttggttaagaaaaaataaaatagttggaattactggattagatacaagaagtttaacaaattttataagagacagaggtgctccaaaaggaacaatttcttactcaaacaaaggtagatttaatattaataagcttacaaattctacaataaaatggagtgggttaaaaaatttagatcttgcagaaaaagttactactcaaaaaaattatatttggaaaggatttaaaacttggaaaaaagagtatggctatagaaaaaataatcgaaattcacttcatgtagttgctatagattatggaattaagaaaaatattttaagatatttttctgattttagatgtaaagtaactgtagtttcatgcaaaacaacttcaaaaaaaattttagcacttaaacctgatggtgtatttttatctaatggaccaggagatccagcagcaactgggaaatatgcaattcaaataattaaggatctcgttcaaaaaaaaataccattatttggtatttgccttggtcatcaaatacttgcactttcattaggtggtaaaacaaaaaaaatgaaattgggacatagaggagcaaatcatcccgtaaaaaatttaatcaatgacaatgtagaaattaccagccagaatcatggctttgaagttgtaaaagaaaatttaccaaaaaatattg

SEQ ID NO: 319289 - DNA, 837 bp, Unknown
  Bacterial polypeptide expressing nucleotide sequence isolated from the Sargasso Sea
tacaggagaagtttgcttcatacttctttaacgggttatcaagaaattatatccgacccatcttatgctggacaaattatcaattttacttttccacatattggaaatgttggaactaataaagaagatcatgagtcagacaaaatttggactaaaggagttatttttaatacggaaataactaatccatcaaactacagatctttaaaaaaattggatagttggttgaaaaaaaataagatagtaggaataacaggtttagatactagaagcttaaccaattttataagagacaaaggagcgccgaaaggcaccatttctaataataataaaggtatttttaatttaaaaaaattaaccaataactctattaaatggcctggattaaatggtcttgatttagcaaaaacagttacaaccaaaaaaaaatacatatggaaaggtttaaaaacttggaaaaaagacaaaggttttgaaaaaaacaaaaagaaaaaatacaaaattattgcaattgattatggaattaagaaaaatattttaagatatttttctaattttaattgtgaagtaattgttgttccttgtgaccttggagctgaagaaattattaaattaaaacctgatggtatttttttatcaaatggtcctggagatcctgctgcaacaggaaaatatgcaataaatataattcaaaaactaattaaaacaaatattccaatatttggaatatgtcttggacaccaattgttagctttggcacttaatggaaaaacaaaaaaaatgaaattgggtcacagaggtgcaaatcatccagtaaaaaatctaattaatagtaaa

SEQ ID NO: 319290 - DNA, 679 bp, Unknown
  Bacterial polypeptide expressing nucleotide sequence isolated from the Sargasso Sea
atggagtggattaaataatcttgatcttgcaaaagaagtttcatgtaaaaaaccttttactttgaaatcaaaaaacaaaaaaaacctactaagaatagtcgcaatcgattacggaattaaacacaacattataaactcacttataaacttaaatgctgaagtaataattgtacccgcaacatctaatacagaaatgatcgtgagttacaggcctgatggaatttttttatctaatggacctggtgatcccaaagctacaggtaaatatgcaattccaataataaaagaattgatagaaatgaaaattcctatgttcggtatatgtctagggcatcagcttatttcattagctctcggagccaagacaaaaaaaatgtttcaaggacataggggtgccaatcatccagttaaaaacttaattacaaataaagttgaaataacttctcaaaatcatggatttgtagttgaagaaaaatctgtgcccaaatcagttctcattacacataaatcactttttgatggatctgttgagggaattaaacacaaaaataaaaaagtattttcagttcagtatcatccagaagcttcacctggtcctcatgatagtcattatctatttgaagattttatttcatccattaaagatcatttaaaacatggcaaaaagaaaagatattaa

SEQ ID NO: 319291 - DNA, 743 bp, Unknown
  Bacterial polypeptide expressing nucleotide sequence isolated from the Sargasso Sea
cttgactaagtccgccctgctcgtactggaagacggcaccgtatttcgcggtacagccattggcgctgaaggagtttctgtaggtgaagtggtgtttaacacttcaatgaccgggtatcaggaaatattgactgatccctcttatgcagaacaaatcgttacgcttacttatccacatatcggtaataccggtactaacctcgaagacgaggagtcaggacaaatttgggcccgcggcctgattatccgtgatctgccgttgttagccagcaatttccgtaaccaactctcacttagtcagtatttaacacaacataatattctcggcatcgccgacattgatacccgcaaattaacccggattttacgtgaaaaaggtgcgcagaacggctgcttaatggccggcgacaacctggatgaagccaaagcacttgagctggccaaaggcttccctggtttatcaggtatggatttagccaaagaagtcaccgttaaagcgccataccaatggacagaaggtagctggcagctgggtgaaggccaccgcacaccagataacgctaagtttcatgtggtcgcctacgattacggcgtaaagcgcaatattctgcgtatgctggtagaccgaggctgtaagttaacggttgtgccggcgcaaacgcctgccagtgacgtgctggcaatgaacccggatggtatcttcttatcaaacggcccgggcgacccggcaccttgtacttatg

SEQ ID NO: 319292 - DNA, 976 bp, Unknown
  Bacterial polypeptide expressing nucleotide sequence isolated from the Sargasso Sea
ttacgcaggtcagattataaattttacgtttccacatatcggaaatgttggaaccaataaagaagatgtcgagtctgataaagtctggacaaaaggagtaatctttaattcagaaataacttctccttcaaattatagagcatttctacatttagatgcctggctcaaaacaaataaaattgtaggtattactggtttggatactcgaaatttaacaaactttattagagataaaggtgcacctaagggaacaattgcttactcaaaaaatggaaaatttaatgttaacaagttaacgaattctaccattaaatggagtggtttaaaaaaccttgatcttgcagaaactgtcacaacctcaaaaaactatatttggaaaggatttcaaacttggaaaaaagaaataggatataaaaaaaatacaaaaaaccttttccatgtcgttgcaattgattatggaattaaaaaaaatattttaagatatttttcagacttcaaatgtaaagtaacagttgtttcttgtaaaacttctgcagaaaaaattttaaatcttaagccaaatggaatatttttatctaatggtcctggtgatccagcagctacaggaaaatacgcgatagaaatacttaatgaattaatcaaaaaaaatttacctatatttggaatttgtttaggtcatcaaattttagctttagccttaggtggtaaaacaaaaaaaatgaagttgggccacagaggagctaatcatcctgttaaaaatttagtccacgataaagttgaaatcaccagtcaaaatcatggttttgtagtggttgaagaaactttacctaaaaaaattgaagttactcataagtctctatttgacaacaccattgagggaataagacttaaaaacaaaccaatattttcagtacaatatcatccagagtctaaacctggacacaagatagcgtctacctctttcaagaatttataa

SEQ ID NO: 319293 - DNA, 805 bp, Unknown
  Bacterial polypeptide expressing nucleotide sequence isolated from the Sargasso Sea
cttactaactttatcagagataaaggagctcctaagggaactataagttatttaaaaaaagggagattcaatattaataagttaacaaatacaaccgttaaatggagtggtttaaaaaatttagatcttgcagaagtagtttcaactaaaaaaaattatatttggaaaggttttaaaacttggaaaaaaaaaacaggttataaaaaaaataataaagacttatttcatgttgttgcaattgattatggtataaaaaaaaatattttgagatatttttctgattttaattgcaaagtaacggttgtttcttgtaaaacacctgctcataaaattttaggtttaaggccaaatggtgtatttctatctaacggtccaggtgaccctgctgctacaggcagatatgctataggaattattaaagagttaataaaaaaaaacttacccatatttggaatttgtttaggtcatcaaattctagcattagctttagggggaaaaacaaaaaaaatgaaattaggccatagaggagcaaatcatccagtcaaaaacttaattaatgataatgtagagataaccagccaaaatcacggtttcgaggtagttaaacaaactttaccaaaaagtattgaggtcactcacaaatctttatttgataatagcattgagggtataaggttaaagaataaaccagttttttcagtacagtaccatccagagtcaaacccaggacctcaagatagtgtttatttatttcaagaatttatcaacaatatgaaaaaaaatgccaaaaagaaaagatcttaaa

SEQ ID NO: 319294 - DNA, 590 bp, Unknown
  Bacterial polypeptide expressing nucleotide sequence isolated from the Sargasso Sea
aagaaaaaagattttcaaagaattccctatagtatgtatagattttggaattaaacataatatacttagaagtttaaaaaagcataattttaaaccaacagtgattaatgcatcttgttctgttgaagaagttatgaaaaataaacctaaaggtatttttttatcaaatggacctggtgacccatatgcaacttcaaaaaaagtactttcaacagtaaaagagcttataaatttgcaaataccaatctttggcatatgtctaggtcatcaaattttaagtattgcttttgatggaaaaactaaaaaaatgtttcaaggtcacagaggagctaaccatcctgtaaaaaatttattaaataataaagttgaaattacatcacaaaatcatggttttgaagtagataggaattctttttctgatcaaattattgaaacacatgtttcgttatttgatggaacaaacgaaggtttcaaacataaatctttgccagtctttagtgttcaatatcatcctgaagcaagtcctggtccacatgacagcagttatctatttagagaattttacaacttagtaaataagcatgcctaaa

SEQ ID NO: 319295 - DNA, 534 bp, Unknown
  Bacterial polypeptide expressing nucleotide sequence isolated from the Sargasso Sea
taagaaatcttaatgaatttaatcttaacccaactgtattaaacttattttctagctacgaagaaatagttaatactaatcctgcaggaatttttttatcaaacggtcctggtgatccttatgctacaggtagtaaaatagttgaggtgattaaaaaattaattgatgataatattccaatatttggaatatgtttagggcatcaaattttgggattggcattaaatgcaaagacaaaaaaaatgtttcaaggtcacagaggctcaaaccatccggtcaaaaatcttaccacaggtattgttgaaattacttcccaaaatcatggttttgaagttgatagagatagttttagcaaagatataattgaaactcatgtttcactatttgatggaaccaatgaaggtttaagacataagcatttaccagtatttagtgttcaatatcatccagaggcgtcgcctggtccacatgatagtcattatttgtttgaggaattttataaacttattgagaaaaatgccaaaaagaactgac

SEQ ID NO: 319296 - DNA, 553 bp, Unknown
  Bacterial polypeptide expressing nucleotide sequence isolated from the Sargasso Sea
ttggaataaacaaaatatattaagaaattttcatgaatttaatttaaaacccactattctaaatctttcaagtagctatgaagaaataattagtactaatccagatggtatttttttatctaatggcccaggggatccatttgctactagtcaagaaattattggtgttcttaaaaaattaattgaaaagcaaatccctatctttggtatatgtttaggtcatcaaattttaagtctggctttaggagctaaaacaaaaaaaatgtttcaagggcatagaggatcaaatcatcctgtaaaaaatttaataaataattttgttgaaattacatctcaaaaccatggatttgaagtagataggaatactttttcaaatgatattattgaaacacacatttctttatttgatggtactaatgagggtttaaggcataaaaatcttcctgtttttagtgtgcaataccatccagaagcatcacctggacctcatgatagtcattatctattttctgatttttataacttaataacaaaacatgccaaaaagaactga

SEQ ID NO: 319297 - DNA, 928 bp, Unknown
  Bacterial polypeptide expressing nucleotide sequence isolated from the Sargasso Sea
atgcaatttaatcatcaatttcctacaggtattttagttttagataacaagctagttttcaaaggtattggccttggataccagggaacttcaactggagaggtttgttttaatacatctttaacaggatatcaggaaattatatcagatccatcttatgccggacaaattataaactttacatttcctcatattggaaacgttggaaccaataatgaagattttgaatctgataaaatttggactaaaggtgtaatatttaattccgaaattacttctccatcaaattatagggcattgaagacattagatgaatggcttaaaaaaaatcaaatagttggattaactggattagatactagaagcttaacaaactttattagagataagggtgctccaaaaggtaccattacaaataataaaaaaggtaaatttaacattaataaactaattaatatgtcagttaaatggcctggcttaaatggtttagatcttgctaatgaagtatcaacaaaaaaaacttatatatggaaagggtttagaacgtggaaaaaggatatcggatataagaagaatacaaaaaagaaatttaaaattatcgcagttgattatgggataaagaaaaatattttaagatatttctcagattatgactgtgaggtaaaggtagtctcttgtaaattagctgctaatgaaattgtgaaattaaaacctgatggtatttttttatcaaatgggcctggagatccagcagctactggaaaatatgcaattgatacggttcaaaaattaattaaattaaattatcctatatttggaatttgccttggtcatcagattttagctttggctttaaatgcaaaaacaaaaaaaatgaaattaggtcatagaggtgccaatcatccagtcaaaaatttaataaataatt

SEQ ID NO: 319298 - DNA, 880 bp, Unknown
  Bacterial polypeptide expressing nucleotide sequence isolated from the Sargasso Sea
gctcccaataataacctttacttttcctcatattggaaatgtaggccttaattcggacgataatgagggttcagataaaccccatatcagtggagcaatatttcgatctcttattacagatccctcgaattggagatctgaagtagatttagataaatggttaaaagacaattcaattgtaggtatttatggaattgatactcgagctttaacaaatctaattagagaaaaaggtctcattaatggaacaatagtgcatgataaaaacgggattcaagaatttgtatcttatcttgaagatactaaaatgtttcgtggggtaaacgatcaagatctagcaaaaattgttacttgcaaagaaaaaatttcttggaatgaaaaagaaataaatatttacaatgatagaatagaaagaaaaagaattaatgctcatgttgttgtaatagattttggagtgaaaaaaaatatactaagatgtttatcttcaaggtttgaaaaaatatcaatagttccatgtacatcttcttacaatgagataattaatttagagcctgatggaatttttctttcgaatggtccaggtgatccaagtgcaactggaatatatgcgataccagtaatcaaacagctaatagaattaaatttacctatatttggtatctgtcttggtcatcaattacttgcgctatcattgggattaaaaacttataaaatgcatcaaggtcatcatggcgcaaatcatccagtaaaaaataatcatgattcaagtgtaaatattacatccatgaatcatggctttgcagtaaagagtgataatttgccacaggatgtcatagaaacacatactagtttatttgacggaagtaattgtgggattgaa

SEQ ID NO: 319299 - DNA, 730 bp, Unknown
  Bacterial polypeptide expressing nucleotide sequence isolated from the Sargasso Sea
atgaaaggccgacttattttcgaagacggttctcattttgatgggattaaaattggctcatccaacatggaaattggtgaggtatgttttaatacctcaatgacaggttatcaggaaataataactgatccctcttatgcaggacaaataattaattttacatttccccatattggaaatgtgggtacaaatcttgaagatgatgagtcaagaaaaccatttgcaaaaggaataattattaactgtgatatttctgacccttcaaactataggtctattcttcaccttgatgcttggctaaaaaaaaataacgtacctggtatatgcaatattgatacaagactaattacaaatagaattcgttcaaaaggtgctccaaaaggaggtattattgaaggtccaataaataataaaaaaactgctctttgtctaaaagaaataaaaaaatggaagggtcttaaaggacttgatctagctattgatgtatcacgtaaagacataaaaatatttaaagctaaaagtaaatctaatctaaaagtagtggcagtagattatggaataaaacaaaatatattgaattgcctcttaaatttaaatttagaagtgattttagtgcctgctaaaacttcagcggagaaaatacttgaatataatccaaatggcgtctttctttcaaatggtcctggcgatcccaaggcaacaggaaaatatgccattccaattttaaaaa

SEQ ID NO: 319300 - DNA, 478 bp, Unknown
  Bacterial polypeptide expressing nucleotide sequence isolated from the Sargasso Sea
gatgatttatccatataagaaaaacgcaaaattagttttaagtaatggaattgtattccctggattttattttggtgccaatggtacagcttttggtgaaatagtctttaatactggaatgacggggtatcaagaagttattactgatccaagttattacggacagatattgacatttacttatccagagattgggaatactggtattaattttgaagattccgaatctagtactaatgttaaagggataattgtaagaaattattcatctaataacagcaattggagatctaaaaaggatttcaatcaatggttagttgaaaaaaatataataggtctccatggaattgatacgagagctcttgttaaaattttaagatctaatggctctatgaatggagttattacctctgtagataaaactttagagagttgtttgaagataattcatgatatgccaaaaatggagggattaaat

SEQ ID NO: 319301 - DNA, 472 bp, Unknown
  Bacterial polypeptide expressing nucleotide sequence isolated from the Sargasso Sea
aatgaatttaaaaggtcttttaatttcgaacggaccaggtgacccaagatcattgcttacagtaatagataccgttcaaaaccttataggaaaacttccaatatttggaatttgtcttggtcatcaaatacttgctttggcttgtggtcttaaagttaaaaaaatgcaatttggtcatcatggttcaaatcacccagttgaaatagagggaataaaaaaagcactaataaccgcacagaaccatggtttctctattgaggagtttgaagatgggtttgagcatgaaaattttggaaacattagtgtctttgcaaggaatttaaatgatggaacaaatgaaggaattagtctttgggattccatggcgtactcagttcaatttcatccagaatcaggacctggtacaactgatggattacaaatttttaatcctttttttgaaatgattgagaataactatgccaaaaaataa

SEQ ID NO: 319302 - DNA, 562 bp, Unknown
  Bacterial polypeptide expressing nucleotide sequence isolated from the Sargasso Sea
ctacggaataaaaaaaaatattctaagatatttttctgattttaaatgtgaagttaatatagtttcttgcaagacaagcgcagaaaaaatattaaatatgaagcctgatggtatatttttgtctaacgggcctggtgacccagctgctacaggaaaatatgctattagaattattaaaactttaattaaaaaaggaatgcctatttttggcatttgccttggtcatcaaatccttgcattggctcttggtgcaaaaacaaaaaaaatgaaacttggacatagaggagctaatcatcccgtcaaaaatctaattaatggcaatgtggaaattacatctcaaaatcatggttttgaaattgttaaagaaagtctacccaaaaatattgagataactcataaatcattgtttgataactgcattgaaggaattagattaaaaaacaaacctgttttttcagttcaatatcaccctgagtcaaatcctggcccacaagatagtgtttatttatttcaagaatttattaacaatattaaaaaaaatgccaaaaagaaaagatcttaa

SEQ ID NO: 319303 - DNA, 491 bp, Unknown
  Bacterial polypeptide expressing nucleotide sequence isolated from the Sargasso Sea
agaaagtacagaagatttaattaaatttaagcctcatggaatatttttatcaaatggtcctggagatccagctgcaaccggcaaatattcaattccaatagttcagaatttaataaaatctggtttgccagtttttgggatttgtttgggccatcaaattcttgctttagcattaaatgctaaaacaaaaaaaatgagaattgggcatagaggtgcaaaccatcctgtaaaaaatttaatctcaaataaagttgagataactagtcaaaaccatggttttgaagttttaaaagaaagtttacctaagaatgttgaaataacacataaatctctttttgataattctattgagggaattaaattaaaaaataaaccagttttttctgtacaatatcacccggagtcaaatccaggcccacaagatagtcactatttattcaacgattttatcaatgaagttaaaaaatatgccaaaaagaaaagatattaaa

SEQ ID NO: 319304 - DNA, 688 bp, Unknown
  Bacterial polypeptide expressing nucleotide sequence isolated from the Sargasso Sea
aaactggatttagcagaaaaggtttctacaaagaaaagttacgtatggaaaggtttaaaaacttggagaaaagaagatggttatttaaaaaatagaaaagactcatttcatgtcatagccattgattacggagttaaaaaaaatatattaagatatttttcagattttaattgtaaagttactgttgtttcatgcaaaactaaagctgcagatataataaatttaaaacctaatggtatttttttgtctaatggccctggtgatcctgctgcgacaggaaaatatgctattccaataatacaagaactaattcaaaaaaattttcctatgtttggaatttgtcttggacatcaaattttggctctagctttgggtgctaaaacaaaaaaaatgagccttggacatagaggggcaaatcatccagttaaaaatttaatcaaaggaaatgtagaaatcacaagccaaaaccatggctttgaagttataaaaagcaatcttccaagaaatattcagattacccatcaatctctttttgataaaagtattgaaggtattaaattaaaaaataaacctgtttattctgttcaatatcaccctgagtctaatcctggtccacaagatagcgtttatttatttgaagaatttataataagtatgaaaaaaaatgccaaaaagaaaagatattaaa

SEQ ID NO: 319305 - DNA, 697 bp, Unknown
  Bacterial polypeptide expressing nucleotide sequence isolated from the Sargasso Sea
atgattaatccatataagaaaaatgcaaaattaattttaagtaatggttttgtattccctggattttcttttggtgcttcagggacagctgttggggaaatagtttttaatacaggaatgacgggatatcaagaagttattactgatccaagttattatggacaaatattaacattcacttatccagaaattggaaatactggaattaattttgaagattcagaatctagtattaatgttaaagggataattgttagaaattattcatcaaataatagtaattggagatctattaagaatttcaatcaatggttggttgaaaaaaatataataggactctatgggattgatacaagggctctagttaaaatcctgagatcaaatggttctatgaatggagttcttacttctgaagagaaatcactagaaaattgtttaaaattaattcatgaaaccccaaaaatggaagggttaaatttgtcagagaacgtttctacaaagcaacaatacttatggcaaaaacctacagaaacagattttgatgttagaaaaaaatatttagaaagacttaaaaaattaaagattgtagctattgattttggaataaaaaaatcaattttaaatagacttgtttctcatggttgtgaaattttagttttaccttctcgatcttctttcaaggatgttctagctaata

SEQ ID NO: 319306 - DNA, 397 bp, Unknown
  Bacterial polypeptide expressing nucleotide sequence isolated from the Sargasso Sea
atatgcgataccagtaatcaaacagctaatagaattaaatttacctatatttggtatctgtcttggtcatcaattacttgcgctatcattgggattaaaaacttataaaatgcatcaaggtcatcatggcgcaaatcatccagtaaaaaataatcatgattcaagtgtaaatattacatccatgaatcatggctttgcagtaaagagtgataatttgccacaggatgtcataaaaacacatactagtttatttgacggaagtaattgtggaattgaagtaattaataaaccaattttttcagttcaacatcatcctgaagcttcgccaggaccaaatgatagttattatctatttgataagtttctaaacaacattgagaaatatataaatgcctaa

SEQ ID NO: 319307 - DNA, 649 bp, Unknown
  Bacterial polypeptide expressing nucleotide sequence isolated from the Sargasso Sea
aaaaaagttccttcaatgaaaaacttggagttagcatcttatgttactactaaaaaatcttatttttatggaaataaatcatcaaagaagaaagttgcggtattagatcttgggtgtaaaaagtcaattttaatgaattttgaaagcagaaatatttattgtaaagtttttcctgctaaaactaaatcaaaagaaattttaaaatggaatccagatgggttttttatttcaaatggtcctggggatcctgcatccatgggctatgctgttaatactgttggagatataattaataaaaatatccctacatttggaatctgtttaggacatcaaatattagctagagcttgtgggttagcaacttacaaattacatcatggccatagaggaattaatcatccagttaaaaatattttaacaggtaaatctgaagttacttctcagaatcatggtttctctgttaaaatggatgatgtaaaaaaaattaaggacatagaattaacacatattaatttaaatgataatactgttgaaggtattagattaaaaaacaaaaatgctttttctgttcaatatcatccagaatcatctcctggacctcatgattctagatacctttttgatgattttgttaaaatgatgaattgat

SEQ ID NO: 319308 - DNA, 674 bp, Unknown
  Bacterial polypeptide expressing nucleotide sequence isolated from the Sargasso Sea
gaatgattttgtaggtttagctggtttagatctcgcaaaaaaagttacaaccgaatctagttacaaatggaaagaaggaacatggagaggcagtagtggtgaatctgattttagagtagcagttttagactatggaattaaaaaaaatatattaagaatattagttgatcaagggtatgagttaaaagtttttcctgcaaaaacttcatgccaagaaattttaaatttcaaaccaaacggagtgtttttgtccaatggacctggcgatcctgaaccatgcatctatgccattgagacaattaaagaattaatacaaatcaatatgcccatatttggtatttgtctaggtcatcaattactagcaatagcattgggtggcaaaacgacaaaaatgaaatttggtcatcacggtgcaaaccatcctgtccaagatctcaaaaccagtaaagtttcagtaagctctcaaaatcatggcttcacggttgaacaaaactccttacctgcaaatgttgagataactcataaatcgttatttgatggaactattcaaggaatccaacattcttctaaaccctttttcagttttcaagggcatcctgaagctagccccggacctcatgatttagcttatctattctcaacatttgataaaaatatgagtataaatgcctaga

SEQ ID NO: 319309 - DNA, 700 bp, Unknown
  Bacterial polypeptide expressing nucleotide sequence isolated from the Sargasso Sea
aaaaataattgaatggaaaggattagaaaatcttgatcttgctactatagtttctactgataataaatatgaaacgaatgaaagcatatgggatcaacgtgataataaatataatcagaataataatggaaaatttaacattgcttgcctagactttggtattaaaaaaaatattttacgcaatttaaacaacaatttttttttaccaaaaattcttccagctaattcatcaatagaagaaattttagatactaaccctaaaggagtttttttatcaaatggtccaggtgatccttttgctactgggaaaatagtaattccaacaattaaaaaaataatagatatgaagatccctatttttggaatttgtttaggtcaccagatcctaagtttaactttaggtgccaaaactaaaaaaatgtttcaaggacatagaggtgcaaatcaccccgtaaaaaatttaaagacctctcaagtagaaattacgtctcaaaatcatggatttgaagttgataaaaatactcttccatcaaatgttatcgagactcatgtctctctttttgatgggactaatgaaggtatagaacataaagaacttcctatttttagcgttcaatatcatccagaagcaagtcctggtccacatgatagtcattatttatttaagaaattttataaagaagtagagaaatatgcctaa

SEQ ID NO: 319310 - DNA, 292 bp, Unknown
  Bacterial polypeptide expressing nucleotide sequence isolated from the Sargasso Sea
atgattaatccatataagaaaaacgcgaaattggttttaagtaatggaattgtattcccaggattcttttttggtgcctctggcacagccattggtgaaatagtttttaatactggaatgactggatatcaggaagttattaccgatccaagttattttggacaaatattaacattcacctacccagaaattggaaatactggtattaattttgaagattcagaatctaatattaatgttaaaggtataattgttagaaatttttcatctaatagcagtaatggagatctaa

SEQ ID NO: 319311 - DNA, 385 bp, Unknown
  Bacterial polypeptide expressing nucleotide sequence isolated from the Sargasso Sea
atgcccgattccccatcagacaaggcccatctcgtccttgccgatggcacggttctgaccggtgtcggattcgggcatcgcggtacctccatcggtgaggtggtgttcaacaccggaatgaccggttaccaggaggtgctgacggatccctcctattccggccagctggtcagcttcacgtatcccgaacttggcaacaccggggtgaatgccgacgatcaagaggcggatcgtccccatgcccggggcgtgatcgctcgccaggtcgcaccgtttcccagcagctggcgctgtgaacagccgctcgagacctggatgcagagccatcaactggtgggcatcagcggtttggacacccgtgccctggtgcgacacctgcgtgagg

SEQ ID NO: 319312 - DNA, 545 bp, Unknown
  Bacterial polypeptide expressing nucleotide sequence isolated from the Sargasso Sea
tattttaagatatttttcagactttaaatgtaaagtaacagttgtttcttgtaaaacctctgcagaaaaaatattagatcttaatccaaatggaatttttttgtccaatggtcctggtgatccagcagcgacaggaaaatatgcaatagaaatacttaacgaattaatcaataaaaatttacctatatttggaatttgtttaggccatcaaattttagctttagctttaggtggtaaaacaaaaaaaatgaagttgggccatagaggggccaatcatcctgttaaaaatttagtccacgataaagttgaaatcaccagtcaaaatcatggttttgtagtggttgaagaaactttacctaaaaaaattgaagttactcataagtctctatttgataataccattgagggaataagacttaaaaacaaaccaatattttcagtacaatatcatccagagtctaatcctgggccacaagatagcgtctacctctttcaagaatttattaacaatatgaaaaaaaatgccaaaaagaaaagatattaaa

SEQ ID NO: 319313 - DNA, 984 bp, Unknown
  Bacterial polypeptide expressing nucleotide sequence isolated from the Sargasso Sea
gtgtatttcaacaccgcaatgacaggttatcaagaaataattaccgacccatcttacgatggtcagatgatcacgttcacttaccctcacataggcaataccggaataaactctgcagattacgagtctaaaaagatttttgctcgtggattaattgtaagagatttttgtaccttcccaagcaattggcgctctgaacaaagtttagatgattatcttaaattaaataaaactatatgcatctccaatatcgatactcgatttttaacaaaaaaaataagagatgagggctgtaaggtaggagtaatatacccatcagaaaaaataactgataaagaagctatgatacaaattaaagatttcggctcaatatctgataaaaatcttataaaaaatgtagcaacaaattcaaaatttattattggagagaaaaaaaataagtcacagaagaaaattgctgcagtagattttggagtcaaagaaaatattctaagaatttttaaagatatgggagcagtaatagaagttttccctcctgactgcaccgctgaagaagttttaaattcaaaacctgatggaatatttttttctaatgggccaggagacccagaggttttatctcatgctgtgtcccaaataaagcttttaatggatgaaaatattccaatgtttggaatatgtcttggacatcaattaatgtctcttgcgtatggcttaaaaattatgaaaatgccattcggacatcacggtgctaaccatccggtacatgacttagagactaacgaggtctttatcacatcgcaaaatcataactttgctgtagaagaacctattgataatgacagtattaaaattactcataagtcactatttgataatactattcaaggattagctcacaaagaaaaaccattttattcaattcaatgtcatcctgaagcaagtcctggaccaaaagaatttgaagtgctttttaaaaaattt

SEQ ID NO: 319314 - DNA, 832 bp, Unknown
  Bacterial polypeptide expressing nucleotide sequence isolated from the Sargasso Sea
atgagcaaagaaaaagcaatacttgcactagcagacggaacaatctttgaaggtataagtattggcgcttcaggaaaggtaaatggcgaaattgttttcaatacttctatgacaggttatcaagaaattcttacagatccttcatatgccaagcaaatagtaaccttaacatacccgcatattggaaatacaggaacaaataatgttgatactgaatcagataaaatttggtgttctggattggttataaggtcgctttctcaggcggaaagtagttggcgtaatactgaaactttatcagatcacctcattagaaataatattcaaggaatttctgatatagatacaaggaaattgacaagaataataagagaaaaaggggctcagtcagcatcaatattcactggtaactcaattgattcaaagaacgcaatagatttagcgaaagattttgaaggtttagctggtttagatctcgcaaaagaagttacaacagaatctagttatgattggaaagaaggaacatggagaggaagtactggggaatctgattttagagttgcagttttagatttcggaataaaaaaaaatatattaagaatattagttgatcaaggatatgaattaaaaatttttcctgcaaaaacttcttgccaagaaattttagatttcaaaccaaacggggtgtttttatctaacggacctggtgatcctgaaccctgtatctatgctattgagacaataaaagaattaatacaaatcagtatgccgatattcggtatttgtcttggtcatcaattactagcaatagcattgggtggcaaaacatcaa

SEQ ID NO: 319315 - DNA, 757 bp, Unknown
  Bacterial polypeptide expressing nucleotide sequence isolated from the Sargasso Sea
aaacaataaaaacggtaattttaatattaaaaaattaattaacatctccactaaatggcccggattaaatggcttagatttagcaaaagatgtaactacaaataaaacatacacttggaaaggattaaaaacctgggaaaaaggaaaaggttttaaaaaaaataaaaagaaatcattgagaattattgcaatagattatggcataaaaaaaaatattttaagatatttttcaaattataattgtgaagtaaaagtagtttcatgtaagcaaactgccgaggaaatattaaagttaaatccaaatggtatttttttatcaaatggacctggtgatccagcggcaacaggaaaatacgcaattcaaactgttcaaaaattaattagatctgatttgcctgtttttggaatttgtttagggcatcaaattctagccttggctttaaatggaaaaactaaaaaaatgaaacttggacatagaggcgccaatcatccggtaaaaaatttaaataataaaaaagttgaaataacaagtcaaaaccatggttttgaagttgtaaaagaaagtttatcaaaaaatatccaaataactcataagtcgctttttgacaactctatagaaggaattaaattaaaaaataaacctgtattttctgtacaatatcatcctgagtcaaatcctggaccacaagatagtcattacctatttaacgattttattaaagatgtaaaaaaatatgccaaaaagaaaagacattaa

SEQ ID NO: 319316 - DNA, 862 bp, Unknown
  Bacterial polypeptide expressing nucleotide sequence isolated from the Sargasso Sea
aatgcctcggctcaaaaaaaataaaattgtaggtattactggtttagatacacgtagtttaacaaactttataagagacaaaggggcacctaaaggaacaattgcttactcaaaaaatggtaagtttaacgttaataaattaacaaattcaaccattaaatggagtggtttaaaaaaccttgatcttgcagaaactgttacaacctcaaaaaactatatttggaaaggatttcaaacttggaaaaaagaaataggatataaaaaaaatacaaaaaaccttttccatgtcgttgcaattgattatggaattaaaaaaaatattttaagatatttttcagacttcaaatgtaaagtaaccgttgtttcttgtaaaacctctgcagaaaaaatattagatcttaaaccaaatggaatttttttatccaatggtcctggtgatccagcagccacaggaaaatatgcaatagagatactcaacaaattaatcaaaaaaaatttacctatatttggaatttgtttaggtcatcaaattttagctttagctttaggtggtaaaacgaaaaaaatgaagttgggccatagaggagccaatcatcctgttaaaaatttagtccacgataaagttgaaatcaccagtcaaaatcatggttttgtagtggttgaagaaactttacctaaaaaaattgaagtaactcataagtctctatttgataacaccattgagggaataagacttaaaaacaaaccaatattttcagtacaatatcatccagagtctaaccctggaccacaagatagcgtctacctctttcaagaatttattaacaacatgaaaaaaaatgccaaaaagaaaagatattaa

SEQ ID NO: 319317 - DNA, 713 bp, Unknown
  Bacterial polypeptide expressing nucleotide sequence isolated from the Sargasso Sea
gttgaaaaaagatcgtataatcgctcgatctaaacctattttaggacagcttattttagaagacggtacttccttcgagggtttaaaaatcggatcagatatcaattctattggcgaagtttgtttcaatacttcaatgaccggttatcaagaaattattactgatccatcatacgcaggtcaaataattaattttacatttcctcacattggaaatgttgggacaaacttggaagataatgagtcatcaatttcttatgcaaaaggaataataattaattgcgatatttccgatccatctaactttagatctatacagcatttagataaatggcttaaaaaaaaaggtattcctggattatgcaatatagatacaagatcaattaccaatagaataagatctaagggggctccaaaaggtggaattgttaaaaaacttataaataagcgtcatgaaaaaaaatttctctcagatgtaaaaaaatggcaaggacttaacaatctcgatcttgcaatcgaagtaacacgcaaaaaaatacagaaatttaaaagtaaatcaaagtcaacattaaacatagtagcaatcgattatggcatgaagcaaaatatcttaaattgcctactagaattaaatatgaatgtaattgttgttcctgcaaatactacatcggatgaaatattagaatataatcctaatgggatttttttatcaa

SEQ ID NO: 319318 - DNA, 387 bp, Unknown
  Bacterial polypeptide expressing nucleotide sequence isolated from the Sargasso Sea
tatggaggtcgcgttgacaaagtctgccttactcgtactcgaagatggaaccgtattcactggcacagcaattggtgccgatggtctctctgttggtgaagttgtttttaacacttccatgacaggataccaagaaattttaactgatccctcttattcacgccaaatagtaactttaacctacccccacattggtaacactggtaccaataatgaagacgtcgaatccaatggggttcatgcttgtggtttaatcattcgcgatcttccactcgtagcaagtagtttccgcaatcagcaaaccctcagtgattatctcaaagcaaacaacgttgttggcatcgcagatatcgatactcgtaaattaactcgaatcctccgtgaaaa

SEQ ID NO: 319319 - DNA, 307 bp, Unknown
  Bacterial polypeptide expressing nucleotide sequence isolated from the Sargasso Sea
caaaaaaaaatgaaattaggtcatagaggagcaaaccatccagtaaaaaatttaattcatgataatgttgaaatcactagtcaaaatcatggttttgaagtagtaaaagaaacgttgccaaaaagtattgaagttactcataagtctttattcgatggtagtattgaaggtataagattaaaaaataaaccagtattttctgttcagtatcatccagagtcaaatccaggaccacaagatagtatttatttatttcaagaatttattcataacataaaaagaaatgccaaaaagaaaagacattaaa

SEQ ID NO: 319320 - DNA, 865 bp, Unknown
  Bacterial polypeptide expressing nucleotide sequence isolated from the Sargasso Sea
atgaataaggacaaagcaatattagctttagcagacggaacgattttcgagggcaagagcataggtgctaaaggagaggtaaacggtgaaattgtgttcaatacctcgatgaccggataccaagaaatacttacagatccatcatatgcaaaacagatagttactttaacttatcctcacataggcaataccggcactaatttagaagatgaagaatcaaatgaaatttggtgctcaggccttgttgttcgatctgtctctcaaatcgaaagtaattggagaaataaagaaactttatctcaatatttaattagaaataatatacaaggaatttccgacatagatacaagaaagctaaccaggataattagaaacaaaggtgctcaatctgcttcaatctttgctggagagaatataagccacaaagcagctgttggtctcgctaaacagtttgatggactagcaggtatggatttagcgaaagaggttagtgtgtcatcctcttacgagtggacagaaggcacatggcgcgggaacaagcttgaatctaatttccagatagttgtcttagattttggaataaaaaagaatattttgagaatcctagctgatagaggctataaaataaaagttttacctgctaaagcttcctatgaagaagtaatggaaagcaagcctgacggagtgtttctttctaatggccctggagatccagaaccttgcacctatgctattgagactatcaccaagcttgctgagagagatatgccattatttggcatatgtttaggccaccagctattggctttatctttagggggaaagacttctaagatgaaatttggtcacccatggcgcaaatcat

SEQ ID NO: 319321 - DNA, 936 bp, Unknown
  Bacterial polypeptide expressing nucleotide sequence isolated from the Sargasso Sea
gatgaagagtcaagccagattcaagttgcatggttttattataaaagaagaaacagtattcccgtctaattggaggtctacagattctattgggaattatttaatgaaaaataatatcaccggaattaaaaatgtagatacgcgggcaattgtctcgcatattcgggataatggtgcgatgaatggtattatttctagtcttgattatgatagaaattcgcttaacagtaagattcaagagcaccctcctatggatggattggatttggcaaaggaagtgtcttgctcaaaaaaatatttgtataatgcaaataaaaaatttaaatacaatgttgccgttattgactttggaattaaaaaaaatattcttcatattttgaatgatattggctgtaggttatctgtttttcctgcagatgttacaaaagaagaaattattgatgaagaacctgatggaatctttttatcaaatggtccaggtgatccatcagttgtaacctatgcaattaatactataaaatctctgttagggtatgttccaatgtttgggatatgtttagggcatcaaattttagcgctcgccttaggtgcatcaacatttaaactaaaatttggacatcgaggtattaatcatcctgtaaaaaatattcaaaatgggaagatagaaataactagtcagaatcatggttttgcagtagaaatacactctcttccaaaaaatatcaatactacacatataaatttaaatgataatactttggccgggtttgaatgtaaaaattatgatgtattttctgtacaatatcatccagaatctagtcctgggtctcatgatagtaggtacttatttgatcaatttatccaattaatgagaaatgccaaaagaactgatattgaatcaattcttattattggtgctggcccaatttatatagg

SEQ ID NO: 319322 - DNA, 376 bp, Unknown
  Bacterial polypeptide expressing nucleotide sequence isolated from the Sargasso Sea
aaaaaataatatcccagtatttggtatttttttaggacatcaacttttagctttagcattaggtgcaagaacaaaaaaaatgaaactggggcatagaggagctaatcatccagttaaaaatttaagaaagggcactgttgaaataacaagtcagaatcatggttttgaagttgtaaaaaataatttgccaaaaaatgtaatgattacccatcaatctctttttgataacagcatagaaggaattcagcttaaaaataaacctgttttttcggttcagtatcatcctgagtctaaccccggtccacatgacagcgtttatctatttgaacaatttattatgagtgtaaaaaaaaatgccaaaaagaaaagatattaa

SEQ ID NO: 319323 - DNA, 331 bp, Unknown
  Bacterial polypeptide expressing nucleotide sequence isolated from the Sargasso Sea
ttagctttggcacttaaagcaaaaacaaaaaaaatgaaattgggtcacagaggtgccaatcatcctgtaaaaaatctaattaatagtaaagttgagataacaagtcaaaatcacggatttgaagtaattaaagaaagcttaccaaaaaatgttgagattactcacaaatctttatttgataattctgtagaaggaataaaattaaaaaataaacctgttttttctgttcaatatcaccctgagtcaaatcctggccctcaagatagccattatttatttaatcaatttattaacttagtaaaaaaaaatgccaaaaagaaaagatattaaa

SEQ ID NO: 319324 - DNA, 799 bp, Unknown
  Bacterial polypeptide expressing nucleotide sequence isolated from the Sargasso Sea
atgattaatccatataagaaaaatgcaaaattaattttaaataacggaattgtatttcatggattttcttttggtgcttttggtactgctgtaggcgaaatagtttttaatactggtatgacgggttatcaggaagttattactgatccaagttattatggtcaaattttaacgttcacttatcccgaaattggtaacactggtataaatcttgaagactcagaatctagcattagcgttaaaggattaattgttagaaattattcctctaataatagtaattggagatctataaagaattttaatcaatggctagtcgaaaaaaatatagtaggactttatggaattgatacaagggctttggttaaaatcttgagatctaatggctcgatgaatggagttcttacttctgaagataaaacagtagaaagttgtttaaaaataatacatgaaactccaaaaatggaaggattaaacttgtcaaaggaagtttctactgaacaaaaatatttatggcaaaatactacagaaacggtctttgatattagaaaaaaatattctgaaaaaaacaaaaaattaaaaattgttgctattgattttggaataaaaaaatcaattttaaatagattagtttctcatggttgtgaaatcatagttttaccttcgtcttctactctaaaagatgttctatctaataaaccggatggaatattcttttcaaatggtccgggcgatccttcttctgttactgaaggcatatgtttagcaaaatcacttattgaatatggtgatattccta

SEQ ID NO: 319325 - DNA, 376 bp, Unknown
  Bacterial polypeptide expressing nucleotide sequence isolated from the Sargasso Sea
ttgaaagaactaattgatcttagaattcctatattcggtatttgtttaggtcatcaactaataagtcttgctttaggagcaaaaacaaaaaaaatgtaccagggtcatagaggtgcaaatcaacctgttaaaaatttaattaataatactgttgaaataacttctcaaaatcatggttttgaagttgaaaggtcaagcttaccaaatcaagttgaagaaacacatgtatcattatttgatgggtctaatgaaggcataagacataaaacacatcctgttttcagtgttcaatatcatccagaagcaagccctgggcctcatgatagtgcctatctctttgaagaattttataaactagttaaaaatcatgcctaaa

SEQ ID NO: 319326 - DNA, 826 bp, Unknown
  Bacterial polypeptide expressing nucleotide sequence isolated from the Sargasso Sea
actgggctagatactagaagcttaaccaattttataagagacaaaggagcacctaaaggcactatctccaataataacaaaggcatttttaatctaaaaaaattaactaataattctattaaatggccaggattaaatggtcttgatttagcaaaagtagttacaacaaaaaaaaaatacatatggagaggttttaaaacatggaaaaaagagaaaggatttgaaaaaaataaaaagaagaaatataaaattattgcaattgattatggaattaaaaaaaatattctaagatatttttctaattttaactgtgaagtaattgttgttccatgtaagcttgaagctgaagatataattagattaaaacctgatggtatttttttgtcaaatggccctggtgatcctgcagcaacaggaaaatatgcaataagtataattcaaaaattaataaaaacaaatattccaatatttggaatatgccttggacaccaattgttagctctagcacttaaagcaaaaacaaaaaaaatgaaattaggtcacagaggtgcaaaccacccagtaaaaaatttaattaatagtagagttgagataacaagtcaaaatcatgggtttgaagtaattgaagaaagtttaccaaaaaatgttgagatgactcataaatctttatttgataattctgtagaaggaataaaattaaaaaataaacctattttttctgttcaatatcatccagagtcaaatcctggccctcaagatagccattatttatttaatcaatttattaacttagtaaaaaaaaatgccaaaaagaaaagatattaaa

SEQ ID NO: 319327 - DNA, 948 bp, Unknown
  Bacterial polypeptide expressing nucleotide sequence isolated from the Sargasso Sea
tgttggataccaagaaattattacagacccttcttactttgatcagatagtcgttatgacaatgcctcatgttggaaattatggaataaacccaattgatgaagaatctgagaagattcaagctgcgggtttggttatcaaagaagaaactccttatccttcgagttggagatcaaaacaatctcttgatgattatttaataagccaaaatatagtttctataaaatcaattgatacaagagctctaactaggcatattagagatcgaggcgcaatgaatggtataatttcatcgataggaaaagaaacaagagctttggaagaaaaattaaaaaaacatccaaaaatggaaggtttagatttggcgaagaaagtgactacaaaaaagatatataaaataaaaagtacagactctagatttagagtagcggtggttgattttggaattaagaaaaatattttaaaattattagtaaatgaaggttgtgacttaacagtctttccatcaaatgtttcaagtaatgaacttttaaatagtcgcccagatggtatctttttgtcaaacggacccggagaccctgcagctctaaattatgctattaaaactgttcataagcttttgggcaccgttccaatttttggtatttgtttgggtcatcaaatattgggtttagcccttggagcgaaaacatataagttaaaatttggacacagaggaattaaccacccagttaaaaacattaaaacaggattagttgaaataaccagtcagaaccatgggtttgctctagatttaaacactttcccgagcaacgtgatttctacatatataaatttaaatgataacacatccgcaggaattgaatgtaaagaatataatgcattttctgtacaatatcatcctgagtcaaatccagggcctcatgatagcagatatctatttggcta

SEQ ID NO: 319328 - DNA, 517 bp, Unknown
  Bacterial polypeptide expressing nucleotide sequence isolated from the Sargasso Sea
tcgatgtctggcatctgccggctgtgaagtaacagttttacctgcatcgagttcagcagatgatgtgcttgcgcacaaacctgatggtattttcttatctaatggaccaggtgacccagcagctactggaaagtatgctgttcctgtcattcagcacttattaaagaatactgacttacctatatttggaatttgccttggacatcaaatgctagcacttgctttaggcgctaaaactataaaaatgaatcatggtcatcacggcgcgaaccatcctgttaaagagcttagctcaggaaaggtagaaatcacgtcaatgaaccacgggtttgcagttgacgcccaaaccttgcccgatggagttgaagagactcatgtatcactctttgatggttcaaactgtggaataaagatgtcagacagacccattttctcagtacagcaccatccagaggctagccctggacctcaggatagtttttacctattcaatgaatttgttgccgctatgaaataa

SEQ ID NO: 319329 - DNA, 841 bp, Unknown
  Bacterial polypeptide expressing nucleotide sequence isolated from the Sargasso Sea
ttgggcaaaagtaaattacatcagtcttatatagaaattatcaaaaaaaacaatctttcagccgtattaattttagaaaccggagaagtttttcatggatcaggatatggaaaaccaggaataaaaatgggggaagtttgctttaatacttcaatgacaggctatcaagaaataattactgatccatcttacaatggtcaaataatcaattttacatttccacatattgggaatattggaacgaatcaagaggacaatgaagctaaaaaatcttatgcatcaggaatgataactagagaacgcccaacaggaagtagtaattggcgttcaaaccaagatctcaatgactggttatttgaaaaaaatattactggaatttcaggattagacacaagacaacttacgaaaattattaaagataagaaagctcctatgggtttgataagttacaatttaaataaacaatttaatatagtttcacttaaacagaaactgttatcacatcctaagataaagggatcaaatttagtccctgtagtatcatcaaacaaatcttttcattgggacaagagtacatcatggtccaaaaacataaattctaataaaaacaaaatttttcatgtattggcttatgactttggaataaaacataatattctaaggtgcctaaaggatcttaactttgaaataacagtcgttccttataattttgattttgaagaacttaaaaatttaaacccagatggtatttttctatctaatgggcctggtgatccttttgaaacatataaatcaattagaaaaaattttgataaattattaaatttaaatcttccaattt

SEQ ID NO: 319330 - DNA, 380 bp, Unknown
  Bacterial polypeptide expressing nucleotide sequence isolated from the Sargasso Sea
tataaaaaataatttacctatatttggtatttgtttaggtcatcaaattttggcattagctttaggtggtaaaacaaaaaaaatgaagttaggacatagaggtgcaaaccatcctgttaaaaatttagttcatgacaaagttgaaattaccagtcaaaatcatgggtttgtagtagttgaagaaactttaccaaaaaaaattgaagtaactcataaatctctttttgataatacaattgaggggataaaacttaaaaataaaccaatattttcagttcaatatcatcctgaatctaatcctggaccccaagatagtgtttatttgtttcaagaatttattaacaacatgaaaaaaaatgccaaaaagaaaagatattaaa

SEQ ID NO: 319331 - DNA, 379 bp, Unknown
  Bacterial polypeptide expressing nucleotide sequence isolated from the Sargasso Sea
aataaaatcaaaccttccagtttttggaatttgtttaggtcatcaaattttagcgttagcattaaatgcaaagacaaaaaaaatgaagttaggacatagaggagctaatcatccagttaaaaatttaatttcaaaaaaagttgagattacaagtcaaaatcatggatttgaagttgttaaaaacagtttaccaaaaaatgttgagattactcataaatctctctttgatagctgtatagagggaattaaattaaaaaataaaccaatcttttctgttcagtatcatccagagtcaaatcctggtccgcaggatagtcactacctatttaatgattttataaaagaaataaaaaaatatgccaaaaagaaaagatattaa

SEQ ID NO: 319332 - DNA, 721 bp, Unknown
  Bacterial polypeptide expressing nucleotide sequence isolated from the Sargasso Sea
cgccgccctgagcgacgaggagctcgtggcgcgggccaaggcgtatgatattgtcggtaaggatttgatcagcgaagtgacgtgcggcgagccgtacgagtggaaggacaccacgggtgagtgggaattcagcaacgaagccaaggcgaacaaggattcgttcaacgtcgtcgtgtacgacttcggcgtcaagcacaacattttgcgccgcttagcctctttcgggtgcaaactcaccgtcgttccggcgtcttacccggcggataaggttttggccatgaatccggacggtattttgttctccaacggtccgggcgatcccagcgcggtgccgtacgcggtggagaacgccaagcaaatcctcggcaagctccccgtctttggcatttgcatgggtcaccaagttctcggccaagccttcggcgggtccacgtttaagctcaagtttggtcatcacggcggtaaccaccccgtgcgcggtcccgacggcgccgtggagatttcctcgcaaaaccacaactttgccgtcgatccgaaaaccttacccgcgggcgtccaagtcagtcacgtcaacctcaacgacggcacgtgcgccggcatggtgtggcccgagcaacgcgcgatgacgattcagtaccaccccgaggcgtctcccggtccgcacgattccgatcgttgtttcgccgatttcgttcaaatgatgcgcgattctaaaaagtaa

SEQ ID NO: 319333 - DNA, 442 bp, Unknown
  Bacterial polypeptide expressing nucleotide sequence isolated from the Sargasso Sea
tcaaatggacctggtgatccagctgcaacaggcaaatatgctatagaaattattaaagatctaattaaaaaaaaattaccaatatttggtatttgtttgggtcatcaaattttagcattagcactaggtggtaaaacaaagaaaatgaaacttggccatagaggagcaaatcatcctgttaaaaatttaattcatgataatgttgagataacgagtcaaaaccatggatttgaagtagttaaagaaacattaccaaaaaatattgaggtcacacataaatctttatttgataatagtattgaaggtataaaactaaaaaataaaccagtcttttcagttcaatatcatccagagtctaatccaggacctcaagatagtgtttatttgtttcaagaatttattaacaacatgaaaaaaaatgccaaaaagaaaagatattaaa

SEQ ID NO: 319334 - DNA, 381 bp, Unknown
  Bacterial polypeptide expressing nucleotide sequence isolated from the Sargasso Sea
aatgagaggttatgtttttttgacggatgacgccctgctagccctcgaagatgggtcattatttcacggtgtttcttttggtagtgacggagaaacaaccggagaagtcgtttttaataccgcaatgacaggctatcaagagattcttaccgacccgtcttattacaaacaaattgttacacttactcatcctcatatcggaaatgttggtacaaatcccgaagatgaggagtcagacagcgtttatgttagcggtctagttataagggacttacctgaggtcataagtagttggcgcgctaatgataatctcagtaattatttgaaaaatcataacattcccgcaatagcaggaattgatacacgtcagttaacaagaca

SEQ ID NO: 319335 - DNA, 694 bp, Unknown
  Bacterial polypeptide expressing nucleotide sequence isolated from the Sargasso Sea
atgggtaaaagctctattctatatcttgaaaacggcaaaatgttcaatggctcgggttttgggtttcatggtgaaacaattggggaaatagtattcaatacgtctatgaccggatatcaggaaattcttacggatccttcatatcattcccaggtggttttgatgacttatcctcatatcggaaattatggaatcaattcaaaagataacgaatctaacgaatgctatgttaaaggatttatagtaagagaattttgtccatacccatcaaatttcatttccgagatgactttggaagaatatctaattcaaaataaagtcgtgggaatttctggtatagacactagagaattaacacgaatcgtaaggaacgagggggcacaaagatgtattatttcttcgaaacaggaagatgtaggtaaattaaaacgtaaacttgaaatgtctcccgaaatgaaaggaaacgatctaaccttgaaagctacgtgtaaagaaatatataggatagatagacagagaaataaaaagaatatttttgtttatgattttggttgcaaaaaaaatatcttgaatatattacatgaagaactaaatattaatcttatcgttggtccttgcgatacagatgtagataccgtgaagagtcttaatcctgatggaattctactttccaatggcccaggagatccatctg

SEQ ID NO: 319336 - DNA, 957 bp, Unknown
  Bacterial polypeptide expressing nucleotide sequence isolated from the Sargasso Sea
attggttttaagtaatggagttgtattcccaggtttcttttttggggcttctggtactgccattggtgaaatagtttttaatactggaatgaccgggtatcaggaagttattactgatccaagttattatggacaaatattaacatttacttatccagagattggaaatactggtattaattttgaagattcagaatctaatattcatgttaaaggtataatcgttagaaatttttcatctaatagcagcaattggagatcaaaaaagaattttaatcaatggttagttgataaaaatataataggtctatatggaattgatacaagggctcttgtaaagattttaagatctaatggcgcaatgaatggtgttattacctctctagataaaactgatgaaagttgtttaaaaataattcaggatacgccaaaaatgaagggattaaatttatcaaaatttgtttcaacaaagcaacaatatttatggaaaagtcatacgcaaacaagttttgatttaagaaaaagatttgataaatattctaaaaagttaaaaatagtagcaattgattttggaattaaaaattcaattctaaatagactcgtatcccatggttgtgaagttttggttttaccttctcgatcttctctaaaggatgttctgtcaaacaagccggatggtatatttttctcaaatggtccaggcgatccttcttcagtttctgaagggataaacctagcaaaatctctcattgaatatggtgaaattcctatgtttggtatatgccttggccaccaaatatttggattagcattaggaggttcaacttataaattaccttttggacatcgtggtttaaatcatccttgtggtgaaaataataaaattgagataactagtcagaatcatggttttgctattgatcctaattctctctcaaaggaccttgttagaattac

SEQ ID NO: 319337 - DNA, 667 bp, Unknown
  Bacterial polypeptide expressing nucleotide sequence isolated from the Sargasso Sea
agtatcaactaaaaaaacttatatctggaaaggttttaagacttggaaaaaagaaatcggatacaaaaaaaatattaaaacaaagtttaaaattgttgcaattgattatgggataaagaaaaatattttaagatatttttctgattataactgtgaagttaaagtagtttcttgtaaaaaaactgctgatgaaattataaaacttaatcctgatggtatttttttatctaatggtcctggagatccagcggcaactggggagtatgcgattgataatataaagaaattgataaaatttaaatatccgatttttggaatttgtcttggtcatcaaattttagctttagctttgaatgcaaaaacaaaaaaaatgaaactaggtcatagaggtgcaaatcatccagtcaaaaatttaattactaactcagttgaaattacaagtcaaaatcatggttttgttgttatagaaaaaagcttatcaaaaaatattcaaataactcataagtcactttttgatgattctattgagggaataagattaaaaaataaacctgtcttctctgtccaatatcatccagaagcaaatcctggaccgcaagacagccaatatttattcaataattttattcaagatgtaaaaaaatatgccaaaaagaaaagacattaa

SEQ ID NO: 319338 - DNA, 880 bp, Unknown
  Bacterial polypeptide expressing nucleotide sequence isolated from the Sargasso Sea
atggccactggagaagtttgttttaatacatctttaactggataccaagaaattatatctgatccatcttatgctgggcaaatcatcaattttacttttccacatattggaaatgtaggaactaacaatgaagatcatgagtctgataagatttggacaaaaggagttatatttaattcagaaataactaacccttctaattatagatcgttaagaaacttagatatctggttaaaaaaaaatagaatagtgggaattactggattagatacaagaagtttaactaattttataagagacgaaggagcgcctaaaggtaccatttctaataataacaaaggtatttttaatctaaaaaaattaactaatagctcaactaaatggcctggattaaatggtcttgatttggcaaaaatagttacaaccaaaaaaaaatacacatggaaaggtttcaaaacttggaaaaaagaaagaggttttgaaaaaaacaaaaagaagaagtataaaattatcgcaattgattatggaattaaaaaaaatattttgagatatttttctaattttaattgccaagtaattgttgttccttgtaaccttgaatctagagatattattaaattgaaacctgatggtatttttttatcaaatgggcctggtgatcctgctgcaacaggaaaatatgcaataaatataattcaaaaattaattaaaacaaatattccaatatttggaatatgtcttggacatcaattgttagctttggcgcttaaagcaaaaacaaaaaaaatgaaattgggtcacaggggtgcaaatcatccagtaaaaaatctaattaatagtaaagttgagataacgagtcaaaatcatggtttgaagtagt

SEQ ID NO: 319339 - DNA, 843 bp, Unknown
  Bacterial polypeptide expressing nucleotide sequence isolated from the Sargasso Sea
aatatggttaaaaaaaaataaaatcgtaggcattactggtcttgataccaggagtttaacaaatcttataagagataaaggcgcacctaaaggaactatttcatattctaaaaaagggaaatttaatattaataaattaaaaaatttatcaaataaatggagcggtttaaaaaatttagatttagccgaaaaagtcacaaccaaaaaaaattataaatggtcaggatttaaaacttggaaaaaagaaagtagatttttaaaaaataaaattagatcatttaaaattgtagcagttgattatggtattaaaaaaaatattttaaggtatttttctgattttaaatgtgaggtcaatatagtttcttgtaaaacaagtgctgaaaaaatattaaaaatgaaacctgacgggatatttttgtctaatggacccggtgatccagctgcaacaggaaaatatgcaattggaattattaaaactttaataaaaaaagaaatacctatttttggaatttgtcttggtcatcaaatacttgctttggcgcttggtgcaaaaacaaaaaaaatgaaccttggtcacagaggcgctaaccaccctgttaaaaatttaattaataataatgtagaaattacatctcaaaatcacggttttgaaattgttaaagaaagtttgccaaagaatgttgagattactcataaatctttatttgatgactgtattgaaggaataagattgaaaaataaaccagttttttctgtccaatatcatccggaatctaatcctggaccacaagacagtgtctacttatttcaagaatttattaacagtattaaaaaaaatgccaa

SEQ ID NO: 319340 - DNA, 877 bp, Unknown
  Bacterial polypeptide expressing nucleotide sequence isolated from the Sargasso Sea
acttttaagggaataaaaatcggatctgatattgatgctattggagaagtttgcttcaatacatcaatgaccggttatcaagaaattattaccgatccatcatacgcaagccaaataattaattttacatttcctcatattggaaatgttggcacaaattttcaagataatgaatcatcgatttcatatgcaaaaggtataataattaattgtgatatttccaatccatctaactttagatctttacagcatttagatgcatggcttaaaaaaaaagatattcctggattgtgcaatatagatacaagatcaattaccaatagaataaggtctaaaggtgctccaaaaggaggaatcgttaaaaaacttataaataaagatcatgaaaaaaaatttctttcagaaataaaaaaatggcagggacttaataatcttgatcttgcaattgaggtgacacgtaaaaaaattcagaaatttaaaagtaaatcaaagtcaaaattaaacatagtagcaatcgattatggcatgaagcaaaatatcttaaattgcctgcttgaactaaacataaacgtaattgttgttcctgcaaatactacatcggatgaaatattagaatataatcctaatgggatttttttatcaaatggtcctggtgatccaaaagctacgggtaaatatgctatacaaaccataaaagatttaattcataaaaagattcccatctttgggatctgtttagggcatcaattaatatctctcgcgcttggcgctaagacaaaaaaaatgtttcaaggccatcgaggagctaatcaccctgttcaaaatttagaaaacaaaaaggtagagataacatctcaaaaccatggttttgtagtta

SEQ ID NO: 319341 - DNA, 344 bp, Unknown
  Bacterial polypeptide expressing nucleotide sequence isolated from the Sargasso Sea
aatatgtcttgggcatcaaattctagctttagcattgggtgcaaacacattcaaaatgaagtttggtcatagaggtataaatcaaccagtaaaaaatttaattacaaacaaagtagaaattacatcccagaatcatggatttgctgttgacgaagatactctaccatctaacgtcactgtaacacataaacacctaaatgatgatactgttgctggaataagctgtaatgatatttcagcatattcagttcaatatcatcctgaagctagtccaggaccacatgattcaagatatgtatttaaggaatttttcaatatgatgaagagcaatgccaaaacgtaac

SEQ ID NO: 319342 - DNA, 850 bp, Unknown
  Bacterial polypeptide expressing nucleotide sequence isolated from the Sargasso Sea
ttcaaattatagatcccttaaccatcttgataagtggctacaaactaacaaaattgtaggtttatgtggagttgatactagagaaattacaaatttgataagaacgaatggagcattaaaaggcacgataataaatcaaagtaaaaaaatcgacaaaaaattttatttaaaaaagtctagagattggtcgggattaaaagggttggacttagcatctaaagtttctacaaaacaaatttataaatgggataatcaagcgctatggaagaaaaaagatggttatgaaatcaacaatacatttaaatatcatgtagttgctatcgattttggtattaaaaaaaatatattaagaaatttttcaaatttaaatactagagttactgttgtaccgataaatacaagttttaaaacaatagttgctttaaagccagatggagtttttttgtcgaatgggccgggcgatccagccgctacatctaaaattgtgaattccacaattaaacaaattttaattaacaaaattcccgttttcggtatttgtcttggtcatcaattattagctcatgctctaaaatgtcaaacaaaaaaaatgcatcagggtcatagaggagcaaatcaccctgttaaaaatattaaaacttctaaagttgaaatcacatctcaaaaccacggatttgaagttattagaaaaagtatcccgaaagatgttgagattactcacgtatctttatttgataattctatagaaggcatatcttataaaaaaagtattgcattttcagtacagtatcatccagaggcaagtcctgggcctcatgatagtaattatttatttaatcaatttataaac

SEQ ID NO: 319343 - DNA, 884 bp, Unknown
  Bacterial polypeptide expressing nucleotide sequence isolated from the Sargasso Sea
ggcgttttagttcttgaaaatagaacaatatttaaaggtattggtataggataccaaggaacagctacaggagaagtttgcttcaatacttctttaacaggttatcaagaaattatatccgacccatcttatgctgggcaaattattaattttacttttccacatattgggaacgtcggcaccaatgaagaggatcacgagtcagataaaatttggacgaaaggagttatttttaacacagaaataactaacccatcaaattatagatctttaaaaaaattggatatttggttgaaaaaaaataaaattgtgggaattacaggactggatactagaagcttaactaattttataagagacaagggagcgcctaaaggtaccatttctaataacaataaaggtaattttaatctaaaaaaattaactaatagctctattaaatggcctggattaaatggtcttgatttagcaaaaatagttacaacaaaaaaaaaatacttatggaaaggtttcaaaacctggaaaaaagaaaaaggttttgaaaaaaataaaaagaaaaaatacaaaattattgcaattgattatggaattaaaaaaaatattttaagatatttttcaaattttgattgcgaagtaattgttgttccttgtaaccttgaagctgatgatattgctaaactgaaacctgatggaatctttttatcaaatggtcctggtgatcctgccgcaacaggtaaatatgcaataaatataattcaaaaattaattaaaaaaaatatcccaatatttggaatatgtctcggacaccaattgttagctttggcacttaaagcaaaaacaaaaaaaatgaaattgggtcatagaggtgcaaatcatccagtaaa

SEQ ID NO: 319344 - DNA, 709 bp, Unknown
  Bacterial polypeptide expressing nucleotide sequence isolated from the Sargasso Sea
tatggagtcagaacttattaagtttcctgggctggttgggcaggatttggcgaaattagtttctacaaaaaaaatttatgattggaatgaaggtagcattaatctttatggcaagaaaattaataagcctcgagatgaattaaaggttatagcatacgactttggaattaaacaaaacattttaagaatactaaaagatttaggatgttctgttaaagtagtacctgctactttttcagcagaagaagcactagaacataatcctgatggtatttttttgtcaaatgggccaggagatccagaggcttgtcattatgctgtgaaaaatataaaagagcttttaaagcataaaataccgatcttcggtatttgtttagggtttcaattgcttggaatttctgttggcggtaaaactatgaagatgaagtttggtcaccatggagctaatcatccagttattgatcttgatactaaaaaagtgcttatcacgagtcaaaaccatggtttcatgatagatgagaaatcactaccttcaaatatccgcctaactcatagatcattatttgataactcattacaaggtatagagttgactgattgttatgcttatggattccagggtcatcctgaagctagcccgggtccacatgacattcatcatatattcaataaattcattagtttcatgaaagagagtaaaaatgcctag

SEQ ID NO: 319345 - DNA, 489 bp, Unknown
  Bacterial polypeptide expressing nucleotide sequence isolated from the Sargasso Sea
tctttccagcaaatgtctcacacgaagaaatactttcttccaatccagatgggatatttttatcaaatggtccaggggaccctgccgctgtaacatatggaatagaaacggtaaaaaatttattaggtaagaaaccaatatttggaatatgtcttggacatcaaattttggctttagcactaggtgcaaatacattcaaaatgaagtttggtcacaggggaatcaatcagccagtaaaaaatttaattacaaacaaagttgaaattacatctcaaaatcacggatttgctgttgatgaagattctcttccatccaatgtaattgtaacacataaacatctaaatgacgatactgttgctggtataagctgtaatgatatttcagcatattcagttcaatatcatcctgaagccagtccagggccacatgattcaagatatgttttcaaagaattttttaatatgatgaagaacgatgccaaaacgtaat

SEQ ID NO: 319346 - DNA, 783 bp, Unknown
  Bacterial polypeptide expressing nucleotide sequence isolated from the Sargasso Sea
ggctcatcagggaacagggcatgcccaaatgcgccattgcgcacgccccggacggccaaattgatatcgacgcgctcattcagactgcgatcgcatgggaaggcctagaacatgcggatttggccgctcaggtcactgaacaagacaattttgagcacgtcgaacgcctttgggacttaacgacgggatttcaggatcagcaaaaagcggatttccacgtcgtcgtgctcgactatggcgtgaagaagaacattcttcgaaacctggcgcatattggcgccagggcgacagtggtccccggtgatatgccgtttgccgacattgcagctttggcacccgacggcgttgtgctgtcgaatggaccgggcgatccagcggcgacgatacttcgaagccgccagacgatctccgatttgattgcaagtggcttgccagtcctcgggatttgcctcggtcatcagctgcttgccctaacgctcggcgcgcagaccatgaaaatggaacaagggcaccatggcgccaatcatccggtgaaagacctggcaaccggcaaagttgaaatcgtttctatgaatcacggtttcaccgtcgatgcgtcgacgctgccagacggcgtcgaagaaagtcacgtctctctgtttgacgggacgaattccgggctggctgttcgcggacggccaatcatttcggtgcagcatcaccccgaggcgagtcctgggccgcaggatagcttctatttgtttgaaagattcgcagagttgatgcggcaacacgcaaagtaaa

SEQ ID NO: 319347 - DNA, 901 bp, Unknown
  Bacterial polypeptide expressing nucleotide sequence isolated from the Sargasso Sea
gataaagtctgggctaaaggagttattcttaattctaatgtaacggaaccatctaattatagatcaattaaaaaactagataagtggctaaaaaaaaggaagattatcggaatagtaggcctagatactagagtaataacgaattacattagagataaaggagctcctaaaggatcaatacaattttcaaaaaaaggaaatcataattttaaaaaacttttaaaaaacgcaagatcatggaatggattattaggcctagacttagctgggaaagttacatgtaaaaaaatttataaatggaagtctctaaagacttggaataaaaaaaacggttacgttaaaaataagaaaaataaatatcaaatcattgcaattgattatgggatgaaaaaaaatcaattaagatgtttttctgatatcaattgtggtgtaacagttgttccagcgaattatccagcagatgagattttaaaacttaaacccaatggtatttttttatcaaacggtccgggagatcctgcagcaactggaaggtatgcaatacctattgttaaaaaattaattgaaaagaaaatacctatttttggtatctgcttaggtcatcaaattttatcattagctctaggggctaaaactaaaaaaatgccgctaggacatagaggcgcaaaccatcctgttaaggatttaaataccaataaagtagaaataacaagtcaaaatcatggttttgaagttgatgctaaatcaattcctaaaaatgtaaaagtcactcacaaatctctttttgatgggtctatcgaaggtatagaagtaaaaaacgaaaaattattttcagtgcagtatcatccagaagcaaatcctggcccacaagatagtaaatatttgttcgaaaaattttaaa

SEQ ID NO: 319348 - DNA, 721 bp, Unknown
  Bacterial polypeptide expressing nucleotide sequence isolated from the Sargasso Sea
acatcattaacaggctatcaagaaatcatctctgacccatcatatgcaggtcaaattattaactttacctttccccatatcggaaatgttggaaccaataaagaggatcatgagtctgataaaatatgggctagaggagtaatttttaactctgaaataacttcaccctcaaactatagatcattccaacatttagatgcttggcttaaaaaaaataaaattgttggtattactggccttgacaccagaagcctaacaaactttataagggacaagggtgccccaaaaggtacgattagttactcaaaaaagggaaaatttaatattaataaattaacaaataccaccatcaaatggagtggattaaaaaatctagatcttgcagaagtagtttcaactcagaaaaattatatttggaaaggtcttaaaacttggaaaaaagaaattggatataaaaaaaataataagaaattatttcatgttgttgcaattgattatggaattaaaaaaaacatcttaagatatttctctgacttcaactgtaaagttacagttgtctcctgtagaactagtgcccaaaaaattttagctttaaaaccaaatggaatatttttatcaaatggtcctggagatccagctgcaacagggaaatatgctatagaaattattaaagatctaattaaaaaaaatttaccaatatttggtatttgtttgggtcatc

SEQ ID NO: 319349 - DNA, 576 bp, Unknown
  Bacterial polypeptide expressing nucleotide sequence isolated from the Sargasso Sea
tgtataatatcgcggttattgattttggtatcaaaaataatatactccgtttgttaaaaaatagtggttgcagtataacggttttcccagcaaatgttaaaaatgaagaaattaaaagtataaatcctgatggccttttcctttctaatggaccgggtgatcccgcggcagttacatatgccattaaaactgtcaggtcacttttaggtttccttccaatttttggaatttgtcttggacatcaaattttagccctttcattgggatgtgatacgtttaaattaaaatttggtcatcgaggtattaaccatcctgtaaagaatcttgaaagtggtagagtagaaatcaccagtcagaaccatggtttctgtgttaatattgattccctgtcaaacaatattcaacctacccatattaatttaaacgacaatactctagctggaattagttgtccagaatattctgcattttctgtacaatatcaccctgaatctagcccaggtcctcatgaaagtaggtatttatttcaacgctttattcaattaatggaaaatgccaaaaagaaccgatattaag

SEQ ID NO: 319350 - DNA, 550 bp, Unknown
  Bacterial polypeptide expressing nucleotide sequence isolated from the Sargasso Sea
tggtatcaaaaagaatatactccgtttgttgaaaaacagtggttgcaatataacgattttcccagcaaatgttacaaatgaagaaattaaaagtataaatcctgatggcctttttctttcaaatgggccaggtgatcctgcggcagttacatacgccattcaaactgtaaaatcacttttaggttatataccaatttttggaatttgtcttggacatcaaatcttggctcttgcattgggatgcgatacgtttaaattaaaatttggtcatcgagggattaaccatcctgtaaagaatcttgaaagtggcaaaatagaaatcaccagtcagaaccatggtttctgtgttaacattgataccctgccaaacaatattcaacctacccatattaacttaaacgataatactctagctggaattagttgtccagaatattctgcattttctgtacaatatcaccctgaatctagcccaggccctcatgaaagtaggtatttatttcaacactttattcaattaatggaaaatgccaaaaagaaccgatattaa

SEQ ID NO: 319351 - DNA, 298 bp, Unknown
  Bacterial polypeptide expressing nucleotide sequence isolated from the Sargasso Sea
gatgaaattagggcatagaggtgctaaccatcctgtaaaaaatttattaactaataaagttgagataacgagtcaaaatcacggatttgaggtaattaaggaaagcttgaagaaaaatactgagataactcacttatcgttatttgataagtctattgaaggaataagattgaaaaataaaccagttttttctgttcaataccatccagaggcaaatccaggtccccaagacagcaaatacttatttacccatttcatcaaagatataaaaaaatatgccaaaaagaaaagacattaa

SEQ ID NO: 319352 - DNA, 417 bp, Unknown
  Bacterial polypeptide expressing nucleotide sequence isolated from the Sargasso Sea
caacaggaaaatatgccgtaccagtaattaaagaattaataaaattaaatataccaatttttggaatatgcttagggcaccaattattatgtctttcttttggagctaaaacaaaaaaaatgtaccatggacatagaggtgcaaatcacccagtacaaaatttaatttcaaaaaaagttgaaattactactcaaaatcatggtttcgaagttattagatcaagtttaccaaaagaaataaaagagactcatatttccttgtttgataaatcaaatgaaggtgttgagcacagtaagttacctatatttagtgttcaataccatccagaatcaagcccagggccacatgacagtcagtatttgtttaataaatttcatcaaaatataaaaaaatatgccaaaaagaaaagatattaaa

SEQ ID NO: 319353 - DNA, 248 bp, Unknown
  Bacterial polypeptide expressing nucleotide sequence isolated from the Sargasso Sea
aataaatttaaaatctggtaagggtgaaataacatctcaaaatcatggttttgctattgataaagatgatacaagtaagaataaaaatattgaaattacgcacatgcatctaaatgatgatactattgcggggataaaaattaagaataaaaagtgtttttctgtacagtatcaccccgaagcaagtgctggaccacatgattcttcatatcttttcgatgagtttattgaattgattaaaaattaat

SEQ ID NO: 319354 - DNA, 528 bp, Unknown
  Bacterial polypeptide expressing nucleotide sequence isolated from the Sargasso Sea
tatgaaaggtcttgaattgatatcaaaaatttccactactaaaaattatacctggaaagacggtattcactctcttttagactcaaataaaaaaaattcgaaaatccaaaataaaaaaaattataccgttgtagctatagattatggtattaaaagaaatattttaagaaatctttatagtagaaacctcgatgtagttgtagtgccttatgcatcaaccacaaatgaaattttgaaatacaaaccatctggaatatttctttccaacggtccaggtgatccaagtgttacgtcaagaaattctatagaagttattaaagatttaatgaaaattaaaattccaatttttggtatatgtataggacatcagttactagcattggcttcaggcggggaaactcttaaaatgcagcaggggcacagaggcgctaatcatccagttaaaaatcatttaaacaataaagtagaaataacgagtcaaaaccacggttttactatttgtagaaaaagtctttgtaaagactttaa

SEQ ID NO: 319355 - DNA, 436 bp, Unknown
  Bacterial polypeptide expressing nucleotide sequence isolated from the Sargasso Sea
tctaatgggcgtggagatccatttgcaacgggagaaaagattgttaaaactttaaaaaaattaatcgatagtgaaattcccatttttggaatttgcataggtcatcaaatattaagcttggcattaaatgcaaaaacaaaaaaaatgtttcaaggtcatagaggctcaaatcatccagtaaaaaatttaattaatggttatgtagaaatcacatcacaaaaccatggttttgaagttgatagagagagtttttcaaaagatataattgaaactcatatttctttatttgatggaacaaatgaaggaataaaacataaatatcttccagtttttagtgttcaatatcatccagaagcatctccaggtccacatgatagtcattatctcttttcagaattttatgatcttataaaacattatgccaaaaagaactgat

SEQ ID NO: 319356 - DNA, 655 bp, Unknown
  Bacterial polypeptide expressing nucleotide sequence isolated from the Sargasso Sea
tgcaactttttagtctctacaaaaaaaatttataagtgggattatggcttatggaaaaaggatattgaaaaggaaagttttgaaaattttccaattgtttgtttggattttggcattaaacaaaatattctaagaaatttaaaaaatttaaattttaatcctacaatcttgccagcagtaacaaatataaaagaaattttaagtaaaaaaccaaaaggtatatttttatcaaatggccctggagatcctgatgctactataaaatttatacttccaacaattaaagagcttatcaaccttgaaatccctatttttggtatttgccttggtcaccaattaataaatcttgcccttggtgcaaaaacaaaaaaaatgtaccagggtcacagaggtgcaaatcaacctgttaaaaatttaattaataatacagttgaaataacttctcaaaatcatggctttgaagttgatagaagcagtttgcctgatgaagttgaagaaacacatgtatctttatttgatggatcaaatgaaggcataagacacaaaactcttcctgtatttagtgttcaatatcatccagaagcaagtcctggacctcatgacagtgcatatctttttaaggaattttataaattaatcaaaatacatgcctaaa

SEQ ID NO: 319357 - DNA, 293 bp, Unknown
  Bacterial polypeptide expressing nucleotide sequence isolated from the Sargasso Sea
aatgtttcaaggacatagaggtgcaaatcatcctgtaaagaatattaaaactaatagagttgaaataacatcgcaaaaccatggttttgaagttgatactcagtcatttaataacaatatctttgaaactcatgtatctctttttgatggttcaaatgagggatttgagcacaagtatttgccaatatttggcgtacaatatcatcctgaatcaagtccaggacctcacgatagtagatatttatttgaaaaattttttaataacatagaaaattatgccaaaaaaaattgat

SEQ ID NO: 319358 - DNA, 352 bp, Unknown
  Bacterial polypeptide expressing nucleotide sequence isolated from the Sargasso Sea
atttgtttagggcatcaaatattagctcttgctttaaatgcaaaaacaagaaaaatgaaattaggtcatagaggtgctaaccatcctgtaaaaaatttattaactaataaagttgagataacgagtcaaaatcatggatttgaggtaattaaggaaagtttgaggaaagatactgagataactcacttatcattatttgataagtctattgagggaataagactaaaaaataatccagttttttctgttcaatatcatccagaggcaaacccaggcccacaagacagcaaatacttatttactcattttatggaaaatgtaaaaaaatatgccaaaaagaaaagatattaaa

SEQ ID NO: 319359 - DNA, 814 bp, Unknown
  Bacterial polypeptide expressing nucleotide sequence isolated from the Sargasso Sea
cgcggctccgtggtgggtgaggttgtgttcaacaccggtatgaccgggtatcaggaggtgatcaccgacccgtcgtatgcaggacagctggtcaccttcacgtatccggaactgggaaacaccggtgtgaatgaggatgatcaggaggcggaccttccccatgccaagggtgtgatcgctcgtcagctggctccacaagccagcaactggcgctgctccgagtccctggacggctggatggatcgccatggactagtaggcatttgcggtgtcgatacccgcgccttggtgcgtcgtctccgggatggcggagccatcaatggtgtgatcagcagtaacggacgtacccccgctgatctgcttgacgaggtccgtcgcgcccccagcatggagggcctgaatctggccagccaggtcagcaccacggagccttataaaagttcgtcgccttgccgcgtcagctttgatcagcggctgaaacatcgtcttgaccatccctaccgggtggtcgccatcgatttcggcatcaagcgggcgatcttggaccgactggtcgcccatggctgtgcgatcaccgttctgccatcgaatgcggatctggagatggtgatgtcgcatcagccggagggtgttttcctttcgaatggacctggtgatccggccgctgtggagagtggtatcgacctggcccgtgcattgctcgagatctccaaccttcccttgttcggtatctgtctcggccatcagatcctgggcctcgccctggggggtcgcaccttcaagctcggctacggccatcgtggtctgaaccatc

SEQ ID NO: 319360 - DNA, 781 bp, Unknown
  Bacterial polypeptide expressing nucleotide sequence isolated from the Sargasso Sea
ggtgctccgaaaggaacaatattcttttttcaaaaaaaaaaggtttaatatcaaaaaactacttaaaactactcaaaagtggagtgggcttaaaaatttagatttagcaaaaaaagtaacgactaaaaaaaatttaatctggcaagattttaaaacttggaaaaaaagtgatggttttgtaaaaaataaaaaaaaattattacatgttgtagcaattgattatggaattaaaaaaaatattttaagatatttttcagactttaattgtaaagttacgatagtttcgtgtaaaacaaatgcaatagatatacttaaactaaaacctgatggaatatttttatcaaatgggcccggagatcctgcggcaactggaaaatacgcaatttcaataatcaaagaattgattaaaaataatttaccgatttttggtatttgtttggggcatcaactattagcattaacgcttggagctaaaacagaaaaaatgaaactaggtcatagaggagctaatcatccagttaaaaatttaatcaagggcaatgtagaaataactagtcaaaatcatggttttgaagttgtcaaaaataatttgccaaaaaatgtaaagattactcatcagtctctttttgacaatagtattgagggcattcagttaaaaaataaacctattttttcagttcaatatcaccctgaatctaatcctggacctcaagacagtgtatatttatttaaacaatttattatgagtatgaaaaaaaatgccaaaaagaaaagatattaa

SEQ ID NO: 319361 - DNA, 437 bp, Unknown
  Bacterial polypeptide expressing nucleotide sequence isolated from the Sargasso Sea
tatgattgaagaaaaagcagttctagctttagctgacggcactatctttagaggcaagagcatcggcgcttccggtcgagttaacggtgaaatagtttttaatacatctatgacgggctatcaagaaatattgactgatccttcatactcaaaacaaatagtaaccctgacctatccacatatagggaatacaggaacaaatcaagaagacatagaatctggaaatatatggtgttctggtttagttataagatccaactctctattggttagtaactggaggagcgaaaattcattaacagaatacttgaagacaaataatatcttgggaatttctgacatagatactagaaagttaactcgattaattagaacgaaaggcgctcaatccgcttcaatttttgtatctgaaaatattgatgaggatgaagcgatag

SEQ ID NO: 319362 - DNA, 1069 bp, Unknown
  Bacterial polypeptide expressing nucleotide sequence isolated from the Sargasso Sea
tttgcaaaatggtgatttttttacaggttatggttttggcgcaaaaactattggtataggagagatatgttttaatacatcaatgacaggttatcaggaaattatcacagatccctcgtactccaaacaaattattaatttcacctttcctcatattggaaatgtaggaacaaataaagaagattttgaaagtcaaaaatcttacgcaagtggaattattacaaggcttttaccaacaaattactctaattggcgatctttaaacaagttcgatgagtggttgaaaagtttaaatgtaccgggtatagctgggattgatacaagattattgacaaaaagaattagagaatcagattcaactaatggtttaattgttcattcagataaaagaaaatttgacttcgatgaattaaaatcaaaacttgctgaacatccatctatgaaaggactagaattattttcatttatttcaactaagaagaaatattattggaaagaaggagttaatttacttttaaaaaataagaaccatcaagaaagaaagaaatctgatttacttactatagtaacacttgattttggtattaagaagaatattttaagaaatctttatgaaagaaatttaaatgttattgttttacctgaaaactctaatttcaataaaatcatgagttataaaccgtcaggaatttttctatctaatggaccgggtgatcccagtgccacttcaaaaagaacgtttgatttactgagcaagttaattgaagtaaaaattcctatttttggtatatgcattggtcatcaacttctcgcactctctttgggggcaaaaacaaaaaaaatgaaacaaggacacagaggagcaaatcatcccgtaaaaaacttagaaaataatagtgtagaaattactagtcaaaatcatggtttttatgtagataaggatacactaccaagtgatttgttggtaactcatctatctttattcgatgattctattgagggtttatctcacaaaacacttccaattttttctgttcaatttcatccagaagcatctccaggtccaaca

SEQ ID NO: 319363 - DNA, 1056 bp, Unknown
  Bacterial polypeptide expressing nucleotide sequence isolated from the Sargasso Sea
aggtggtattcaacaccgggatgaccggctaccaggaggtgctgacggatcccagctatgccgggcagctggtgagtttcacctatcccgagctgggcaatacgggagtgaatggacaggatctggaggcggagacgccccatgcacgcggagtgatcgctcgacagctgtcgccgtgtcccagcaactggcgcagcacgggtgatctccagacctggatggtcggccatgggctggtcgggatctgcggtgtggacacccgggcactggtgcgtcatctgcgcgaggccggtgcgatgaacggcgtgatcgggagcgacggtcgtactccggctgaactgatgcagcagctgaagcaggctccttcgatggaagggctgaacctcgccgacgctgtcagcacgcggactccctacgcctggcagtccccctgcgctgcgagcttcgatcagcggctgaggacgaatcctgaggagcgctaccgggtggtcgcgatcgatttcggcatcaagcgggcgatcctggatcggcttgctgcccatggctgtgccgtcacggtgcttcctgccagcaccgatctggagaccgtgttggaccatcgcccggaaggggtgttcctctccaacggtccgggggatccggccgcggtcagcggtggaatcagcctggcccgccagttgctggatcagccggatctgcccctgttcgggatctgtctaggccatcagatcctcggtctggccctcggcggcagcaccttcaagctcacctacggccatcgaggactcaatcatccctgcggcacgcatggccaggtggagatcaccagccagaaccatggatttgcccttgatgcggcgtccctggacagcagccgcatcgcgatcacccatctgaatctgaacgaccgcaccgtggcagctctcgcgcatcgcaaccgacctgtcttcggtgtccagtaccacccggaagcaagtccaggcccccatgacgcggaccaccatttcgccaggttcgtgaccttgatggcggatcggcggtccagtggtggttgac

SEQ ID NO: 319364 - DNA, 1126 bp, Unknown
  Bacterial polypeptide expressing nucleotide sequence isolated from the Sargasso Sea
catggacgccctgcttgtgctggctgatggcaccgtgctgcgcggcaggggctttggcgccattggtacagccatcggtgaagtggtcttcaacaccggcatgaccggttaccaggaggtcatcaccgaccccagttacaccggacagctgatcaccttcacctacccggagcttgggaacaccggcatcaatggtgaggatctcgaggctgatgcaccggcggtcaacgccgtgatcacccgtgagcttgcacctgcagccagcaactggcgcagcagtggcagcctcgagtcatggctgcagcagcatggcgtcgtgggattgagcggtgtcgacacccgtgctgtggtgaggctgctgcgtgagggcggtgccatcaatggcgccgtcagcaatgacggcaccagcccgcaggtgctcctcgagcgtgtgcgtcagaccccatctatggagggccagaatctggcggctcaggtcagcaccgcaagcccttatcagtggcagcaggcaacagcggccggctttgaccaacggctgcagccacagcctgagcggccttaccgggttgtggccatcgatttcggcatcaaacgggcgatcctcgagcgcctcagtgcccatggatgccatgtggaggtgttgcctgccagcgccgagattgatgaggtgatggccatgcagccagagggggtcttcctctccaatggcccaggcgatcccgcggtggtgagcagtgggatcgccttggccgaagccctgctgcagcaaccgcaattgccgctgttcgggatctgccttggacaccagatccttggtctggccctcggtggcaccaccttcaagctcggttatggccatcgcgggctcaaccacccctgcggcggtgatggtctggtggagatcaccagccagaaccatggcttcgccatcgatgcagccagcctggattccaagcgtgtcgcgatcacccaccacaacctcaatgacggcacggtggccgccctggagatgcgtgatcagccggtgttcggtgtgcagtaccacccggaagcctcgccagggccccatgacgctgaccaccacttcagccgttttcacaccttgatggcagagcggcgcaatatc

SEQ ID NO: 319365 - DNA, 1060 bp, Unknown
  Bacterial polypeptide expressing nucleotide sequence isolated from the Sargasso Sea
aacacttctttaactggataccaagagattatatcggacccttcgtatgctggtcaaattattaattttacatttcctcatattggaaatgttggaactaacaatgaagatttagaatctgataaaatttggacaagaggtgcgatatttaattcggagattacttctccctcaaactacagagctttaaaaactttagatgaatggcttaaaaaaaacaaaatagttggattgactggattagatacaagaggcttaacaaattttattcgtgacaaaggtgccccaaaaggaacgatatcaaataataaaaaaggtaaatttaacattaaaaaattaattaataattcaattaaatggcctgggctagacggcctagatcttgcaaaagaagtttcaacaaaaaaaacttattcatggaaaggttttaaaacttggaaaaaaaagaacgggtataaaaaaaataacaaaaaaatatttaagatagttgcaattgattatggaataaaaaaaaatattttaagatatttttctgattataattgtgatgtaaaagtagtttcttgtaagataaccgctgaggagatttcaaaattaaaaccagatggaatttttttatcaaatggtccaggtgatccagcagcaactggtaaatatgcaattaaaaccatacaaaaattaataaagtggaattatccaatctttggcatttgcttgggccatcaaattttagctttggcgctaaatgctaaaacaaaaaaaatgaagttaggtcatagaggagcaaatcatccagtaaaaaatttaattaataacaaagttgagatcacaagccaaaatcatggttttgttgtaatagaaaaaagcttatctaaaaaaattcaaataactcataagtcactgtttgataatactattgaaggaataagattaaaaagtagaccagttttttcagttcaataccatcctgaggcaaatcctggaccacaggatagtcaatatttattcaaaagttttattcaagatgtaaaaaaatatgccaaaaagaaaagacattaaa

SEQ ID NO: 319366 - DNA, 784 bp, Unknown
  Bacterial polypeptide expressing nucleotide sequence isolated from the Sargasso Sea
acgcttaacgagagctattaggatgttaggagccccgcacgtagctctatcccataaacctgatggtgattttgatactgcagagcttgtacaaaaagccaaaagtttttctggtttagaaggcttagatttggcgacaaaagttacgtgtcatcaaatgtacaaatgggatgaaatgcgctgggcatggccaaaaggctttgaaagacaaaatcaagcaaagcataaagttgttgccattgactatggcgcgaagcgaaatatcctacgatgtctggcatccgccggctgtgaagtgacagttgtccctgcatcaagtttagcagatgagatactcgcgcataaacctgatggggtttttttatctaatggaccaggtgacccagcagctactggtaaatatgccgttcctgttattcaacacttattagagaatactgatctccctatctttggaatttgcttagggcaccaaatgctagcacttgctttaggcgctaaaacaataaaaatgaaccatggccatcacggcgcgaaccatcctgttaaagagcatagttctggaaaggtagagatcacgtcaatgaaccatgggtttgcagtggacgcccaaaccttgcccgatggtgttgaagagacacatgtttcactctttgatggctcaaactgtggaataaagatgtcagacagacctgttttttctgtgcaacaccacccagaggctagcccgggacctcaggatagcttttacctattcaatcaatttgttgcctctatggaataa

SEQ ID NO: 319367 - DNA, 466 bp, Unknown
  Bacterial polypeptide expressing nucleotide sequence isolated from the Sargasso Sea
ttgaatcctgatggagtttttttgtctaatggcccaggtgatcctgcggcgacaggaaagtatgcggtaagcgttatcaaaaaacttataattttaaacatacctatctttggcatttgtttaggccatcaacttttagcattggctcttaatgctaagacaaaaaaaatgaaacttggacatagaggagcaaatcatcctgtcaaaaatattttaactgacaaagttgaaatcacaagtcaaaatcatggtttcgaggttataaaatcaagtttgcctaaaaacgtaattataactcacaaatcgttatttgataattctattgaaggaataaaattgaaaaataaaccagtattttcagtgcagtatcatccagaagcgaacccaggacctcaggatagccaatatttatttgaccaatttattaatgcgataaaacaaaatgccaaaaagaaaagatattaaa

SEQ ID NO: 319368 - DNA, 484 bp, Unknown
  Bacterial polypeptide expressing nucleotide sequence isolated from the Sargasso Sea
tatgaatttcaaagctgatgatattttaaataaaaaatttgacggtatttttttaagtaacggtcctggcgatcccaaaaaagtatatgataatataaagcttgaactgaataagttgcttgataaaaagattccaacatttggaatatgtctaggtcatcaaattttaagcttagcttttaatgcatcgaccgctcgaatggaaaaaggtcatcgaggtggaaaccatccagtaaaaaacttaaatactaacaaagtagaaattacatctcaaaaccatggatttgttgttctagacaaaaattttccttctaatcttcaaattactcataaatcgttgtttgataaaactattgatggaatgaagtccaaagatcaacccttgttttcagtacaatatcacccagaatctagtcctggaccacatgatagtagatatctttttgatgaatttataaatttaatagataaaaatgccagctag

SEQ ID NO: 319369 - DNA, 1195 bp, Unknown
  Bacterial polypeptide expressing nucleotide sequence isolated from the Sargasso Sea
ttgaacaaaaagcaaaaagtaaactcaacaaatttttcaaatttatcatcaggcgttttagttcttgaaaataaaaagatatttaaaggtataggtatcggatatcaaggaacagcaacaggagaggtttgcttcaatacttccttaacaggttatcaagaaattatatccgatccatcttatgctggacaaattattaattttacttttccacacattggaaatgtcggtactaacaaagaagatcacgagtctgacaagatttggacaaaaggagttatttttaatactgaaataactaatccgtcaaattatagatccttaaaaaaattagatacctggctgaaaaaaaataaaattgtaggaattacaggattggatactagaagcttaaccaattttataagagataaaggagcgcctaaaggtacaatttctaataataataagggcaattttaatctaaaaaaattaactaatagctctattaaatggcctggattaaatggcttggatttagcaaaaacagttacaacgaaaaaacaatatatatggaaaggtttcaaaacatggaaaaaagagaaaggttttgaaaaaaataaaaagaagaaatataaaattattgcaattgattatggaattaaaaaaaatattttaagatatttttctaattttaattgtgaagtaattgtagttccttgtaaccttgaggctgaagatattattaaattgaaacctgatggtatttttttatcaaacggtcctggggatcctgctgcaacaggaaaatatgcaattagcattattaaaaaattaattaaaacaaatattccagtatttggaatatgtcttgggcatcaacttttagctttagcacttaaagcaaaaacaaaaaaaatgaagttgggacacagaggtgcaaatcatccagtaaaaaatctaattaatagcaaagttgagattacaagccaaaatcatggatttgaagtagttaaagaaagcttaccaaaaaatgttgagatgactcataaatctttgtttgataattctgtagaaggaataaaattaaaaaataaacctgttttttctgttcaatatcacccagagtcaaatccaggccctcaagatagccattatttatttaatcaatttattaacttagtaaaaaaaaatgccaaaaagaaaagatattaaa

SEQ ID NO: 319370 - DNA, 1120 bp, Unknown
  Bacterial polypeptide expressing nucleotide sequence isolated from the Sargasso Sea
aatgaatcatccttttaagaaaaatgcaaaacttgttttgagtaatgggataacttttactggttattcctttggtgcgatgggttcaactgttggcgaaattgtttttaatactggtatgactggttatcaggaagtaattactgacccaagttattttggtcagatcattacatttacttatcctgagattggaaatacaggaatcaatttcgaagattcagaatcagataattctgtcagaggtataattgtgcgtaatttttcaaataataatagtaattggagatctaaattaaactttaatcagtggctaatagaaaaaaatattattggactttatggaattgatacaagagctcttgttaaaattttaagatcgaatggttccatgaatggagttatcactactgaaaaaaatgattttgatagttgtcttgaaattatttctaatactcccaatatgcaaggtttgaatttagccaaagatgtttcaacaaagaaaaattatatttttaaagaaactacaatgactgattttgatgtaagagaaaaaatccacaataatataaataaatacaaaattgtggcaattgattttggtattaaaaaatcaattctcaatagattagtttcgcatggatgtgaaatattggttttgccttcaaattcttcatttgaagatgttttaagtcatgatcctgatggaatatttttctcaaatggtccaggtgatccttcatctgtccttgatggaattaacttagctaaagcactaattgattttggaaaaattcctatgtttggtatttgtcttggtcatcaaatatttggtttggcattaggtggaaaaacatataaattgccttttggacatcgtggattaaatcatccttgtggcatgaataataataatattgaaattacaagtcagaatcatggttttgctatagatccaaattctttgtcaactgaatcagttgaaataacccacttgaatcttaatgataaaactgtcgccggattgaaacttataaataagcctatatttagtgttcaatatcatccagaagcaagtcctggtcctcatgattcagattatttatttgaaaaatttgtt

SEQ ID NO: 319371 - DNA, 1094 bp, Unknown
  Bacterial polypeptide expressing nucleotide sequence isolated from the Sargasso Sea
taccaaggggaagcaactgggtgaaatttgttttaacacttctttaactggctatcaggaaattatatctgatccatcttatgcaggacaaattataaattttacttttccacatatcggtaatgttggaacaaataatgaggatttagaatctgacaagatatggacaagaggagtaatttttaattctgaaataaccagtccttcaaattatagatctcttaaaaatttagatgaatggttaaagaaaaacaaaatagttgggataactggacttgatactagaagtctaacaaatttcataagggataaaggtgctcctaaaggcacaatatcaaacaataaaaagggtaattttaatataaaaaaattaattaatatttcaacaaaatggcctgggttaaatggcttagatttagcaaaagaagtatctacaaaaaaaacatatacttggaaaggattaaaaacttgggaaaaaggtaaaggttttaaaaaaaataacaataaatcattaagaattgttgcaatagattatggtataaaaaaaaatattttaagatatttttcaaattatgattgcgaggttaaagtagtttcatgcaaacaaactacagaggaaatattgaaattaaaaccaaatggtatttttttatctaatggacctggtgatccagcagcgacaggaacatacgcaattcaaactgttcaaaaattaattagttctaatttgcctgtttttggaatttgtttaggtcatcaaattcttgctttggccctaaatggaaagacaaaaaaaatgaaacttggacatagaggcgctaaccatccagtaaaaaatttaaataataaaaaagttgaaataacaagtcaaaatcatggatttgaagttgttaaagaaagtttatcaaaaaatatccagataactcataagtcactttttgataattcgatagaaggaattaaattaagaaataaacctgtattctctgttcaatatcaccctgaatcaaatccaggaccacaagatagccattacctatttattgattttattaaagatgtaaaaaaatatgccaaaaagaaaagacattaaa

SEQ ID NO: 319372 - DNA, 1078 bp, Unknown
  Bacterial polypeptide expressing nucleotide sequence isolated from the Sargasso Sea
agttgaagcacatctagttctttcagatggaacaattttcaacggagagatggtcggtgccgtgcctgaaggaggactggtttcaggagaagtagtgtttaacactgtactaagcggatatcaagaagtaataacagacccctcatatgcaggacagataatcactttcacttacccacacattggtaattatggtgtcaacgctgaggacaatgaaagctccgccccattttgcagaggcatcgtagtaagagacttggccagaagacacagtaattggagagcaaatcagggtcttgatgaaatgcttaaatcaagaggaatttctggaatagctggtgtagatactcgtcgattaacccgacacatacgaaatttaggagccatgccaggagcattcggagatgttggcattgaaaaattaaaactagctgcaagtaaagaaccaggaacagacaacatagatcttgtaaaaacagttacttgcgatgaaatttacaatgttgcttcgactggtggtacgagaaaaattgttgcttatgattttggtgtaaaatcaacgattcttcggcacttatctaagttgggtgagatcatagtggtgccagcggggacctcatccgaagttgttttagatatgaaacccgacggagtttttttatctaatggtccaggagatccggcacctttagattatgtccgagaaaatataaaaagcattctaggaaaagtacctgtattcgggatttgcttagggcatcaacttttagcggaaactttaggagctgaaatttttaaacttccatttggacaccatggaggaaatcatcctgtaaaaaatctaaaaactggcatagttgaaataactagccaaaaccacaactactgtgttgcggaaggttccattaaagatgcagaagttacccatataaatttgaatgatgggacgatagctggcattaattgtcttaacgttcctgcttttagcgtgcaatatcatccggaagccggccccggtccccatgacagtagctatctttttgagcagtttgaaaatcttttggggagagcgggataa

SEQ ID NO: 319373 - DNA, 1204 bp, Unknown
  Bacterial polypeptide expressing nucleotide sequence isolated from the Sargasso Sea
ttgaagaagactggtcataatataaactctaaaaaaaatctcaaaaagatcgattccactgctattttagttcttcaaaacggtaagttttttaaaggtgttggtttaggttacaaaggcactgccactggtgaagtatgttttaatacttcaattaccggataccaagaaataatctctgatccctcttatgcagatcaaataattaactttacttttcctcatgtaggaaatgtaggaacaaataaagaggatcacgaatctgacacaatatggactaaaggtgtaataataaacactgaaataacaaatccatcaaattatagatctttaaaacatttggatcaatggttaaaaaaaaataagattgttgggataactggaatagatactagaaatttaacaaattttattagagataaaggtgctcctaaggggactatatctttttataacaaaaataaagtaaatataaaaaaactcttaagaattactaataaatggagcggtctcaaaaacctggatttggcaaaacaggttaccactaagaggaattatttgtggcaagattataaaacatggaaaaaagaaagtggatatttaaaaaataaaaaaaaattgctacacgtagttgcaatagattatggaattaagaaaaatattctaagatatttttcagattttaattgtaaagttacgatcgtaccatgtaagtcaactgcaaaagatattataaaactgaaacctaatgggatattcttatcaaatggtcctggggatcctgctgctactgggaaatacgccataccggtaattcaagacttaatcaaaaaaaaattaccattatttggtatctgtttaggccatcaaatacttgccttagcacttggtgctaaaacagaaaaaatgaaattaggccataggggagctaaccatccggtcaaaaatttaattgagggtaatgttgaaattacaagtcagaaccatggttttaaagtagtaaaaaaaagtttacctaaaaatataagagtaactcatcagtctttatttgataatagtattgagggaattgagttgaaaaataagcctgttttctcagttcaatatcatccggaatctaatcctggcccacaagatagtgtttatttatttgataaatttgtaaagagtatgaaaaaaaatgccaaaaagaaaagatattaaa

SEQ ID NO: 319374 - DNA, 1201 bp, Unknown
  Bacterial polypeptide expressing nucleotide sequence isolated from the Sargasso Sea
ttgagacagattaaaaataaaaaagaaaataattcacatagtttttcaacaggtattttagtttttgaggatggcaccaaattttttggcaaaggtattggctatgaaggtaatgctgttggagaagtttgttttaatacttctataacgggctatcaagaaattatgacggatccatcctattcagatcagattataaattttacttttcctcatataggcaatgtaggtacaaacccagaagataacgaagcagataaagcctgggcaaaaggagttatttttaattgtaatacaacagagccatcaaattatagatctataaaaaaattagattactggcttagaaaaagaaaaattgttgggattgtaaatttagatacaagaataattacaaattatattagagacaagggtgcacctaaaggagtaatacaattttcaaaaaaaggtaaacataatataaaagatcttgtcaaaaaatctaaatcttggaaaggacttctgggtctagatctagctcaaaaagttacttgtaaaaaaatttatacttggaattcattaaagtcttgggataaaaaaagaggatacttaaaaaataaaaaaaacctatttaaaattattgctattgattatggaattaaaaaaaatcagttgagatgtttttctgatattaattgtaaagttattgttgtgcccgcgaattattcggcagaaaatataatgagtctcaaacctgatggtgtctttttatccaatggacctggtgatccagctgagactggaaaatatgctattccaataattaaaaaattaatttcatacaagattccaatttttggtatttgtttgggtcaccaaattttatcattagctcttggtgcaaagactaaaaaaatgttactaggtcatagaggagcaaatcatcctgtgaaggatttaatgaataataaagttgaaattacaagtcaaaatcatggttttgaggttgataaaaaatcaattccaaaaaatgttacagttacacataaatctttatttgatggaagtatcgaggggattgaagtgaaaaataaaaaattattttccgttcaatatcatccagaggcaaacccaggacctcaagatagtaaatacttattcgaaaaatttttaaataacataaaaatgaaaaaaaatgccaaaaagaaaagatattaaa

SEQ ID NO: 319375 - DNA, 1201 bp, Unknown
  Bacterial polypeptide expressing nucleotide sequence isolated from the Sargasso Sea
attgggcaaaagtaaattacatcagtcttatatagaaattctcaaaaaaaacaatcttacagctatattaatattagaaaccggagaagtttttcatggatcaggctatggaaaaccaggaataaaaatgggtgaagtttgctttaatacttcattgacaggctatcaagaaataattactgatccatcttacaatggtcaaataatcaattttacatttccacatgttgggaatattggaacgaatcaagaggacaatgaagctaaaaagtcttatgcttcaggagtgatcactagagagctccctacaggaagtagtaattggcgttcaaataaaaatctcaatgactggttatttgaaaaaaatattactgggatttcaggattagacacaagacaacttacaaaaattattaaagataaaaatgctcctatggggttgataagttacaatttaaataaaagatttaatatagattcacttaaacagaaactgttgtcatatcctaaaataaagggatcaaatctagtccctgtagtatcatcaaacaaatcttttaattgggacaagagcacgtcatggcccaaaaacatacgttttaataaaaacaaaatttttcatatattagcttatgactttggaataaaacacaatattcttagatgcctaaaggatcttaacttcaaaataacagttgttccttataatttcgattttgaggaacttaaaagtttaaacccagatggtatttttctatctaatggccctggggatcctgttgaaacatataaatcaattcagaaaaattttgataaattgttaaatttaaatcttccaatttttggtatttgcattggccatcagcttttggctttagcttttggagctcaaactgaaaaaatgaaacaaggtcatagaggtgctaatcatccagtttatagattaaaagataaaacagtcgaaattacttcacaaaatcatggattcaaagttgttgaagaaacacttccaacctttttaaatattactcataaatctctttttgatggaacaattgagggattagagcataaatccaagcctatcttttcagttcaatatcacccagaggcctctcctggccctcatgacagtagatatttattccaaaaattttataaattaatttctgatagagcaaaaaatgcccaaaagaagtga

SEQ ID NO: 319376 - DNA, 691 bp, Unknown
  Bacterial polypeptide expressing nucleotide sequence isolated from the Sargasso Sea
cttgaagccttctgcaattcttctagcggacgggacggtaatacctgctgaatcaattggacatgatttaattactataggtgaaattgtattcaatacatcgatgactggatatcaggaaattattactgatccctcatacaataaacaaattgttacttttactaatcctcatattgggaatactggaattaatgttgatgattatgagtctagttataacggatgctcaggaattattatcagaaattaccctacaaaggagagtagctggagaaacgaaaataattttattgaatttctcaaagacaaatcgatttctgctgtttgctcggtagatacaagatatttgacatctcttctaagagaaaaaggttctatcgatgggtgtatagtgccagacataaaaaaattggatcaagcaagggatttattatcaaaattcccaggtctaaatggattagacttagcaaaaaatgtgacagctaaagagcaatatatttggaatgaaggaacacatgatttagtaaatgttgaatcttcaaaaaatcaagaagagctaagggtatttgcctatgattatggaattaaaaaaaatatattaagaatactcactgatttaggttgcaatgtgactgttgtcccagcagagactacttataatgaagtattgaaacataaacctgatggt

SEQ ID NO: 319377 - DNA, 1183 bp, Unknown
  Bacterial polypeptide expressing nucleotide sequence isolated from the Sargasso Sea
cgaaaaaacaaaacttcacatctctccaattttaacacagctattttagttcttgaaaatagatcagtctttaaagggattggactaggacatgcaggagaggcaactggagaggtatgctttaatacatcattaactggttaccaagaaataatatctgatccatcgtatgcaggacagataataaattttacatttccacacattgggaacgttggggttaacaaagaagacatagagtctgataaaatatggacaagaggagttatttttaattcagagataacaagtccttcaaattataggtctcttcaaaatttagataagtggcttaaaaaaaataaaatagtaggcataactggtcttgatactagaagtttaacaaattttatcagagataaaggggctccaaaaggaacaatatcaaacaataaaaatggtaaatttaatattaataaactaataaataaatcaataaaatggcctggtttaaacggaatggatctagctgaagaagtctcaactaataaaacttatatttggaaaggatataaaacttggaaaaaaaataagggttatgaaaaaaataaaaaaaaaaaatttagggttgttgcgatagattttggtattaaaaaaaatatacttaggtatttttctgatttcgattgcgaagttaaagtcgtttcctgcaaagaaaatgcaaataatatacttaatctaaaacctcatggaatttttttatcaaacggtcctggagatcctgccgcaacaggaaagtatgcaatcaaagttgtaaaaaatttaataaaaaaaaatataccgttatttgggatatgtttgggtcatcaaatattagctttagctttagacgcgaaaaccaaaaagatgaaattagggcacaggggcgcaaatcatccagtcaaaaacttgattacaaataaagttgaaattacaagtcaaaatcatggatttgaggttgttagagaaagcttaaaaaaaaatacagaaataactcatctatcattattcgacaattcaatagaaggaataagactaaaaaatagaccagttttctcagtccaatatcatcctgaagcaaatcctggaccacaagatagtaaatatttatttagtaattttattaaagacattaaaaaatatgccaaaaagaaaagacattaaa

SEQ ID NO: 319378 - DNA, 1195 bp, Unknown
  Bacterial polypeptide expressing nucleotide sequence isolated from the Sargasso Sea
ttgatcaaaaaacaaaaaaataaaattgcaattaatcatcaatttcctacaggtattttagttctagataacaagctagttttcaaaggtattggccttggatatcaaggaacttcaactggagaggtttgttttaatacatctttaacaggatatcaggaaattatatcagacccatcttatgctggacaaattataaactttacatttcctcatattggaaacgttggaaccaataatgaggatttagagtctgataaaatttggacgaaaggtgtaatatttaattccgaaattacttctccatcaaattatagagcattagagacattagatgaatggcttaaaaaaaatcaaattgttggattaactggattagatactagaagcttaacaaactttattagagataagggtgctccaaaaggtactattacaaataataaaaaaggtaaatttaacattaaaaaactaattaatatgtcagttaaatggcctggcttaaatggattagatcttgctaaagaagtatcaacaaaaaaaacatatatatggaaagggtttagaacttggaaaaagaatatcggatatcaaaagaataaaaaaaagaaatttaaaattatcgcagttgattttgggataaagaaaaatattttaagatatttcgcagattataactgtgaggtaaaggtggtctcatgtaaattagctgctgatgaaattgtgaaattaaaacctgatggtatttttttatcaaatggacctggagatccagcggctactggaaaatatgcaattgatacggttcaaaaattaattaaattaaattatcctatatttggaatttgccttggtcatcagattttagctttagctttaaatgcaaaaacaaaaaaaatgaaattaggtcatagaggtgccaatcatccagttaaaaatttaataaataattcagttgagattacaagccaaaatcatggatttgttgttatagaaaaaagcttatctaaaaatattcaaattactcataagtcactctttgacgatactattgagggaattaaactgaaaaataaacctgtcttttctgttcagtatcatccagaggcaaatcctggacctcaagatagtcaatacttattcaaaaactttattcaagatgtaaaaaaacatgccaaaaagaaaagacattaaa

SEQ ID NO: 319379 - DNA, 772 bp, Unknown
  Bacterial polypeptide expressing nucleotide sequence isolated from the Sargasso Sea
aattttaagatctagtggctcgatgaatggagttattacttcattagataaaactgatgaaagttgtttaaagattctttctgatacgccaaagatggagggattaaatttatcaaaagttgtttcaacaaagaaaaaatatttatggaaaagtcatacgcaaacaatttttgacttaagaaaaagatatgatgaattttctaaaaagttaaaaatagtagcaattgattttggaattaaaaattctatcctaaatagacttgtatcccatggttgtgaagtattggtttttccttctcgagcttctctaaatgatgttctgtctattaagccagatggtatatttttctcaaatggtccaggcgatccttcttctgttactgaaggaatagaattagcaaaatcacttattgaatatggtgaaatacctatgttcggtatttgccttggtcaccaaatatttggattggcattgggaggttcaacttataaattaccttttgggcatcgtggcttaaatcacccatgtggtgaaaataataaaattgagattactagtcagaatcacggttttgctattgatcctaattctctatcaaaggaaatagttagaataacccactacaaccttaacgataatactgtggctggcttagaagttaataataagccaatatttagtgtccaatatcatccagaagcaggacctggcccacatgattcagattatttatttaaaaaatttgtttctctaatgttagaaagatgttga

SEQ ID NO: 319380 - DNA, 850 bp, Unknown
  Bacterial polypeptide expressing nucleotide sequence isolated from the Sargasso Sea
atgacaaacgaattttcatcgaatacgccaaccgcttgcctcgcactcgcggacggaactttattttttgggaaaggcttcggtgcaactggtgaaacaactgctgaactctgctttaacacatcaataacaggatatcaggaaattcttactgatccttcttatgcaagccaaattgtaacctttacatttccgcatattggcaacgttggggtaaacactgaagacgccgaaactgaaaatcccgctgccgaaggcttgattgtcaaatgggacccaacacaaccatcaaactggagatcattggaacatttatcagactggttaagaaaatataatttattgggaatgggcggagttgataccagacgtttaacgagagctattaggatgttaggagctccgcatgtagcaatatctcataactctaatggtgtttttgataccgcagaacttattaaaaaagctaaaagtttttccggtttagaaggcttagacttggcagaaaaagtcacttgtaagcaaagctacaagtggaatgaaatgcgctgggcatggccaaaaggctttgaaagacaaaaacaagcaaaacataaagttgttgccattgactatggagcgaagcgaaatatccttcgatgtctggcatccgccggctgtgaagtaacagttttacctgcatcaagttcagcagatgaggttcttgcgcacaaacctgatgggattttcttatctaatggaccaggtgacccagcagctactggaaagtatgctgttcctgtcattcagcacttattagataatactgatctacctatctttggaatttggctagggcacaaatgctagc

SEQ ID NO: 319381 - DNA, 379 bp, Unknown
  Bacterial polypeptide expressing nucleotide sequence isolated from the Sargasso Sea
catcgaaactttcctgaccactgatattcctgtgtttggtatttgtttaggtcaccagttactggccttagccagcggtgctaagacgatcaaaatgacagtaggtcaccatggtggtaatcatccggtgaaaaatctggacaccaacaaagttctgatcacagcgcaaaaccacggttttgccgtagatgaagcgactttacctgccaatgtacgtgcgactcacaagtcgttgtttgatggtactttgcagggcattcaccgtaccgacaaaccagccttcagtttccaggggcacccggaagccagccctggtccacatgaagccagtgaattgtttgaccactttatcgaattgatgcaacagcgtcaggcttaa

SEQ ID NO: 319382 - DNA, 751 bp, Unknown
  Bacterial polypeptide expressing nucleotide sequence isolated from the Sargasso Sea
ataaaagatattgatactaggtcattaactatacatttgcgaaatcatggagcgatgaatggtgttgtctgttcagaagatttcaacgaaagtgttttaaaggaagagctaaataattacccttcaatggaggggatggaccttgcgaagattgtctcaacaaaaaatgaatacatattttcaaaaaaaggagcgaaaaaagtcgctgtgcttgattttggagtcaaaaagaacattttaaacatatttcaaaaattagattgctgtgttacggtactacctgcaaatacaagtgcagaaaaaatactagatctaaatcctgatggtatatttttatcaaatggacctggggatcctgctgcagttagttatgcaattggaacagtaaaaacgcttttagggaaaaagccaatatttggtatttgtttggggcatcaaattcttgccctttcattaaacgctaaaacttttaaattaaaattcgggcatcgaggaataaatcatcctgtaaaaaatatagattctaacttagttgaaattacaagccagaatcatggtttcgctgttgatagtaatagtttgccctcaaatgttattgaaacacacattaatctaaatgataacactaatgctggcatagattgtccagaatactctgcattttctgtccaataccatccagaatcaagtcccggaccacatgatagtcgttatttatttgagaaatttatcggattaatgaatgcctaaa

SEQ ID NO: 319383 - DNA, 1093 bp, Unknown
  Bacterial polypeptide expressing nucleotide sequence isolated from the Sargasso Sea
atgaaagaagccattttattattgcaagatgggagcatttttaatggtgtatcactcgggcacataggtgaaacggttggtgaagtctgttttaatactgggatgacaggatatcaagaaattctgactgatccctcttaccgaaaacaaatagtgaccatgacctccccccatgttggtaattatggaatcaatgccaatgatgtggagtctaaaacaattcaggttgcagggtttgttataaaagaaggaacagatatcccatctaattggcagtccaaagagtgcctagatggttatttaaaaagagaagaaattgttggtattcaagacatagatacgcgcgccctcactagacatattcgcgattgtggagctatgaatgggattatctcttcaattgaaaaagacgacaatcttttaaaaagaaagttagacttagtaccatcgatggaggggcgagatttagttaaagaggttacatgtaatgagccatatacatgggaaaataaaagtgaaggatctcttaaagtagcagcaattgactttggaattaaacataatattttgagattactgaaagaaagagattgtactattaatgtgttccctgcaaatatatctcccgaagaaataatggaaacagatccggatgggatctttctttcaaatggtcctggagacccctcggcagtatcatacggcattgaaacagtaaaagccttgcttggtaaaaaaccaatatttgggatatgtctcggacaccagattctggcacttgcattaggagcaacaacttctaaattgaaatttggacatcgtgggataaatcacccagttaaaaggattgcaaccggggcagtagaaataacaagccagaatcatggttttgtagtagatcttgaatctcttccaaaaaatgtagcactaacccatgtgaaccttaacgataatacctcagcagggatatcttgcgatgagttatctgcattttctgttcagtatcatccagagtcaagtccagggccacatgatagccggtatctttttaatcactttatagatttaatgaataatgccaaagagaaatgat

SEQ ID NO: 319384 - DNA, 1093 bp, Unknown
  Bacterial polypeptide expressing nucleotide sequence isolated from the Sargasso Sea
aatgaaaaaagcaattctattattagcagatggcagagtatttaaaggatttgtctttggcgcggagggagaaacgattggtgaggtgtgttttaatacagggatgacaggctatcaggagatactaacagacccttcttattgcaggcagattgtgacaatgacagcaccccatattggcaattatggcattaatgatgaagatgtagagtcacataaaattcaagttgcaggttttgttattaaagaagagagccctattacttcaaattggagatcgaagagttcaataagtgattatttaaaaagagaaaaaattgttggcattcaaggtatagacacccgatcactaactagccacctcagggataatggtgcaatgaatggaattatatctacaacagatatggatatagaatccttgaatgagaaactcaactcttctaatgatatgacaggtctagatctcgctaaagaagtaagctgcgaaaaaaaatatttatggaatgaaaaacataaaggtcaacacaaagtagcagcaattgattttggtgtaaaatataatattcttaggttacttgaagatcatgattgcaatgtgacagtttttcctgcggccacatctgcaacggagatctttgattttcaacctgatggagtatttctttcaaacggccccggtgatcctgctgcagtaaaatacggtataagaacagtaagagatattcttgggaaaattccaatatttggaatttgtttaggccatcaaatacttgcacttgcacttggagcaaagacatataaactaaaatttggtcatagagggattaatcaccctgtaaagaatttaaagaccaatgaaattgaaataacaagtcaaaatcatggttttgcagttgatataacatccctccccaaaaatgttatatcaacacacatcaatcttaacgatagtacgtctgagggcattgagtgtaaagaattatccgcattttctgtccaataccaccctgaatcaagtcctgggcctcatgacagtcgttatttatttaattattttatacaattgatgaaagatgccaaaaagaactga

SEQ ID NO: 319385 - DNA, 1132 bp, Unknown
  Bacterial polypeptide expressing nucleotide sequence isolated from the Sargasso Sea
gttgtttgtgaccgttgaggcaatattagcccttgaagatggaacgattttcactggtacatcaataggcgttaacgggcatgcaataggagaggtggtctttaatacctcaatgaccggttatcaagaaattttaacggacccatcctattgtcagcagattgtgaccttaacttatcctcatattggtaacactggaactaatattgaggatatggaatccagaaaaacgcaagcttctggattgattattcgaaactcttctttagttgagagcagttggcgatcaacacaaagtcttaatggttttttagaatcaagtaatactgttgcgattgctgatatcgatacacgaaaactcacccagcttctcagggaaaaaggagcccaatctggctgtataatggctggtgagattgatgaaaatattgcgataaaaaatgctaagggttttcctggtcttttgggcatggatttagctaagaaggtaactacaaatcagccctatgagtggacagaagggtctctatatgaaaatcgattaagtgcgagtaaaaaggatgatcttaaatatcatgtggttgcttacgattatggcataaagactaacattcttagattgttcgttgatcttggttgtaaaataacagttgtgccagcagaaatgcctgcaattgatgtcttagcgcttaatcctgatggggtattcttatcaaatggacctggtgatcctgatgcatgtaagtatgccattgaagcaattaaacattttattgataactttgtacctgtttttggtatatgcctgggataccaacttttggcacttgcctctggggctaaaaccatcaagatgaaatttggtcatcacggggcaaatcaccctgttctggatttaaatacaggtaaagtgattatcacaagccagaatcatggttttgcagttgaagagagctctttgccaagcaatatcaaggtaacacataaatctttatttgatcatacgttgcaaggcatcgaaattgaaaataaaaatgcctttggttttcagggtcatccagaagcaagccctggaccacaagacttaatgggtttattcaataaatttattaaaatgttaaaaaacagataa

SEQ ID NO: 319386 - DNA, 1123 bp, Unknown
  Bacterial polypeptide expressing nucleotide sequence isolated from the Sargasso Sea
atgtcatttccagctatattagcactgaaagatggaagtgtattctatggaaaaggttttggaaaagaaaagtttgatgttggagaattagtttttaatacctcaatgtcaggatatcaagaaataattactgatccctcatacaaaaaacaaataataacttttactcatcctcatattggcaatactggaataaataatgatgataatgagtcaaatcaagttcattcctcaggtgttgttgtaaataaattttgtgagaagccaagcaattggcgttctgtaaaatctttggaagaatttctaaatgaaaatgatgtgatggctatttctgatgtggatacaagagaaatcactacgattttaagagaaaaaggtgcattgaattgttgcgttggttctttatcaaaaatttctaaaaaagatgcagttaaaaaagcgcaagaatttgatggcttaaagggaatggatcttgctcaagtggtttcaacaaaggatgaatatctatggaatgagggcgtttggccagaaaacaagaaaactagggattcaaacatggttgttgcttatgactatggtattaaagaaaacatacttagacttcttgcagatcatgttggagaagttaaagttgtaaacgcagaaacaccttttgaagaaattatgaaattttctccaaaaggcatatttttatcaaatggtcctggagatccagagccatgcgtatatgccattgatagtattaaaaaattcttgaaagaggaagttcctatttttggaatatgtttaggacatcaactattagcattggctggaggcgcaaaaacctacaagatgaaatttggtcaccatggtgcaaatcatcctgttcaagatattgattcaaaggaagtattcattacaagtcaaaatcatggatttgctgttgatgaggacacattgccatcaaatataaagaccacacatatttctttatttgacaaatcactacaaggcattgagtttaaagatactccagcatttagtttccaaggacatcctgaagcaagtcctggtccgcaagaaatccaaagcctatttaaaaaatttagcagcatggtaaaagattatgccaagacgtaaa

SEQ ID NO: 319387 - DNA, 883 bp, Unknown
  Bacterial polypeptide expressing nucleotide sequence isolated from the Sargasso Sea
aatgaaaaatgctatccttttactagcagatggtcgggcctttaagggttccgcttttggtgcagagggtgagacaattggagaggtttgttttaataccgggatgacgggctatcaagagatattaactgacccttcctattgtaaacaaatcgtgacgatgacagcgcctcatattggcaactacggtataaacatggaagatgtggagtctaaaagaatccaagttggaggttttatcataaaagaagaaagcccaattacctctaattggcgttcagaaatttcaataggcgactatctaaaggatgaaaaaattattggaattcaaggagtagatacgcgtgcccttacaagccacctcagggataatggagcaatgaatggtattatttctaccatagatatggacacagcatcactcaggtctaagcttgattctgtgcctgatatgaaaggcttagacttggcgaaagaggtgagttgtaaaaataaatattcatgggtcaaagagcagaatggcaaatataatgtcgcagctattgatttcggtataaaacataatatacttaggctattagaagagaataattgtaatgtgaccgttttcccagcgaatgtctcttcttcagaggtccttggtatgaaacctcatggagtatttctttcaaatggaccaggtgacccagccgcagtaacatatggaatacaaaccgtaaaagaattactggggagggtgcccatctttggaatatgcttaggccaccagatacttgcgattgcacttggtgcagatacttttaaactaaaatttggtcatagaggaattaatcatcccgtaaaaaatttagagacagggatgattgagataacaagccaaaat

SEQ ID NO: 319388 - DNA, 1093 bp, Unknown
  Bacterial polypeptide expressing nucleotide sequence isolated from the Sargasso Sea
aatgaagtttgatgtaaaactactacttgagaatggaatttcattcgagggtattggttttggataccaaaaaataggtgttggagaagttgtttttaacactgccatcacaggctaccaagaaatacttaccgacccatcttatgatggccaaataattactttcacttatcctcatatcggtaatacaggaattaattttgaagacaatgagtctaagcaagtttctgcaagaggaatgattgttaaaaacttttgtgattttccaagtaattggagatcaaaacaaagcctcgaagaatttttaatagaacaaaaagttatttgtatatcagatatagatacaaggcagctgacaaaaattttacgtgatgagggctgtaaggttggagcgatttatccaactcagagttttacagatgacgaagcacaatttgaaatacaaaattttggaagtattgaggataaagattttactgagaatgtctcagtaaaagaaccttataactttggccaacccaaaaataaaaagacttataagatcatcgctatagattttggaattaaagaaaatattttaaggatcttacaaagaatgggtggagatgttgaagtggtgccaccaagtattagcgtagaagagatacaaaaaaagaatccagatggaattttcctttctaatggtcctggagatcctcaagtcttagttgaacctataaaggaagttaaaaaaatgatgcgccttgatattcctatatttggtatttgtttaggtcatcagattatgtctttagcatatgatttagaaatagaaaaaatgccttttgggcaccatggagcaaatcatcccgttcatgacttaaaaaataatatagtctttattacgtcacagaatcataactttgctgttgccgagccaaaaaatagagatgatatcaatattactcataggtctttatttgataactctattcagggcatagagcataaagagaaaccattttattcaattcaatgccaccctgaggctagtcctggaccgaaagaatttgaaattttatttaaaagattttttgaggatatgaatgcctaa

SEQ ID NO: 319389 - DNA, 670 bp, Unknown
  Bacterial polypeptide expressing nucleotide sequence isolated from the Sargasso Sea
tttggtaactacaaagaagcaatataaatttaatgaacgtcctcacaaattattatccaaaaaaaacatagaaaaaagaaattttaaaccaaaaatagtcgtcatcgattttggtgttaaacaaaatatactaaggcacctagtaaatttaaatgctgatattgttgtgttaccagaagatactaattttgaaaaaattgaaaattttgaaccagatggaattttcttatctaacggaccaggagatcctgcagcaacagaatcaaaatgtagaaaactacttaaatcaatattcaaattaaatattcctgtttttggaatatgtattgggcatcaattaattgggctatcttttggggctacaactagtaaaatgtctcaaggacatagaggggctaatcacccagttaaaaacttaataaataacaaagttgaaataacaagccaaaatcacggttatcaaatagatatcaattctcttcctaagtgttttgaaattactcacacttctttgtttgatagctcaatagaaggcctcaaacataaagatcttccaatcttttctgtacaataccatcctgaagcctctcctggaccaactgagtcttcttatctatttgaagaatttttaaatcatataaaagtatcaaaaaatgccaaaacgaagtga

SEQ ID NO: 319390 - DNA, 953 bp, Unknown
  Bacterial polypeptide expressing nucleotide sequence isolated from the Sargasso Sea
attgaacaaaaaacaaaaagtaaactcaaaaaaaaaatcaaattttagcccgggtattttagttcttgaaaataaatcaatttttaatggaattggtattggttatgaaggtactgctacaggagaagtttgttttaatacttcaatcacgggttatcaagaaataatttcagatccttcttatgcaggacaaattattaattttacctttccccacattggtaatgttggaactaataagcaagataatgagtctgaaaaagtctggactagaggtgtgatttttaactcagaaataactaatccttcgaactatagatctttaattgaattagatttatggcttaaaaaaaataaaattgttggtttgactggtttagataccagaagtttaacaaatttaataagagataagggagcgccaaggggaacaatttctcacaaaaaaaaaggtgtttttccagtaaaaaaacttattaataaaacattaaaatggccaggtctcaatggtctagatttagcaaaaacagttactactaaaaataaatttacttggaagggattacaaacttggacaaaaaaagatggttttaaaaaaataaaaaaaaaaaaatttagggttgtcgcaattgattatggaattaaaacaaacattttaagatatttttcaaatttttattgtgatgtaatagttgtgccgtgtgatgcttcagctgaatatatcatgacacttaaaccaagtggaatttttttatcaaatggccctggtgatcctgcggcgacaggcaaatatgcaattaaaattataaaaaatcttataaaaaaaggtttaccaatttttggaatttgtcttggacatcaattattagctcttgccctaggtggtaaaacaaaaaaaatgaagcttggacataggggggcgaaccatcctgtcaaaaacataaaaaataata

SEQ ID NO: 319391 - DNA, 1000 bp, Unknown
  Bacterial polypeptide expressing nucleotide sequence isolated from the Sargasso Sea
ctgcgcgcgcatcctgtcgatgcgtttcgctgcggctcgcagtcggatagacaggtcggcaacagggtgttccccaaggagtctcccgtgttgccgtcattttctcccgctttgctcgcactcgccgacggcacggtctttcgtggttactcgatcggcgcccccgggcatacgatcggcgaagtcgtgttcaacaccgctatcaccggctatcaggaaatcctgaccgacccgagctacgcgcgccagatcgtgaccctcacgtatccgcatatcggtaacgtcggcgtgaatgccgaagacgtcgaagccacgaaagtccatgccgccggcctgatcatccgtgatctgccggttctcgcgtcgaacttccgcatggagcgcacgctcccgcaatacctgaaggacgaaggcgtggtcgccatcgccggtctcgacacccgtatgctgacgcgcgtgctgcgcgacaagggtgcgcagaacggcgccattctggccggttcggatgacgaagcgaaggcaatcgaactcgcgcgctctttcccgggtttgtcgggcatggacctcgcgaaggtcgtgtccaccaaggaaacctacgaatggacccagaccgaatggcgtctgggcaccggctacggcaagcagaacgcgccgaaataccgtgtggtcgcgttcgattacggcgtgaagtacaacattctgcgcatgctggccgagcgcggctgccacgtcaccgtgttgccagcgcaagcctccgcggctgacgcactggcgctcaacccggacggcatctttctgtcgaacggcccgggcgacccggagccgtgcgattacgcgattgccgccaccaaagagctgatcgaacgcggtatcccgacctttggtatttgccttggccaccagatcatgggcctcgctgtcggcgcaaagaccatgaaaatgaagaccggccaccacggcgcgaaccatccggtgaaggatctggacgacggccgcgtgg

SEQ ID NO: 319392 - DNA, 1198 bp, Unknown
  Bacterial polypeptide expressing nucleotide sequence isolated from the Sargasso Sea
ttgaagaaaaaagcaaaaaaaaataactcaaataaaatctcaaagattcatacaggtgttttagttcttgaaaataggacagtgttaaaaggtattggcattggatatgaaggtaccgcaactggagaagtttgttttaatacatctttaactggttaccaagaaattatttctgacccctcatatgcgggacaaataattaactttacctttcctcatataggaaacgttggaacaaataaagaggatcatgagtctgataaaatttggacaaagggtgtgatactcaactctgaaattacaaacccatcaaattatagatctttggcaaatttagacttatggcttaaaagaaataaagtagtcgggataactggcttagatactagaagcttaactaatttcattagagacaagggcgctcccaaaggaacaattgctttaaataaaaaagggaaatttaatttaaaaaaattaatgaatataaccataaaatggaatgggttaaaaaatttagatttagctgaaaaagtaacaactaaaaaaaattatatatggaaaggatttaaaacttggaaaaaagaaattgggtatataaggaataacaccaaatcacttaatgtagttgctatagattatggtattaaaaaaaatattttaagatatttttcagattttaattgtaaagtaaatatagtttcatgcaaaactagtgttgaaaagattttaaaattaaaaccaaatggtatttttttatctaatggacctggtgatcctgcagcaacaggaaaatatgctataggaataattaatgaacttatcaaaaaagacttacctgtttttggaatatgtttaggtcatcaaatattaggtttagcactaggtgcaaaaacgagaaaaatgaaattaggacacagaggggcaaatcatcctgtaaaaaatttgattgaaaataaagttgaaattacaagtcaaaatcacggtttcgagattgttagagaaaatttacccaaaaatattcaagtaactcacacatctttatttgataatagtattgaaggaattagattgaaaaacaaacctgtgttctctgtccaatatcaccctgaatctaaccctggccctcaagatagtgtttatttatttcaagaatttatcaacaatatgaaaaaaaatgccaaaaagaaaagatcttaaa

SEQ ID NO: 319393 - DNA, 1102 bp, Unknown
  Bacterial polypeptide expressing nucleotide sequence isolated from the Sargasso Sea
catgcaaaaattaaaaaaggctatcctgtttcttgaggatggccttttttttatcggaaaaagtcttggtaaaagtggagaaacttttggtgaagtttgcttcaacactggaatgactgggtatcaagaaatattaactgatccttcatattctaatcagatgattgcaatgagtagtccacatatagggaattatgggaccaataatagcgataccgaatctgaaagagtttatgctacaggctttataatcaagagcgaatctatacaaccttcaaattggaggtctgaagaatctatatcatcttttctaataaaacataatatagttggcattcaagatattgacacaagagcattaactattcacataagaaaaaaaggtgcaatgagagggattatttcaacggaagattttgacgctcataatttggccagtaaaattaagaatattcctaaaatggaaggtcaagacttagcaattaaagttgccagaaaggaaaaagtggttttatcaaatactgataatcctacttgtaaaattgcggcaattgattttggcatgaaaagcaatatatatgatattatgctagaacacgatgctgaagttgaaatctttccagcaaatgtatcccacaatgaaatacttgcttctaatccagatggtgtgtttttatcgaatggacccggagaccctgctgctgtaacatatggaatagaaactgtaaaaaatttgttgggtaaaaaacctatatttggaatatgtcttgggcatcaaattctagctttagcattaggtgctaatactttcaaaatgaagtttggtcataggggtattaatcaaccagttaaaaacttaattacaaacaaagttgaaattacatctcaaaatcatggatttgctgttgacgaagattctcttccatcaaatgtttcagttacgcataaacatttaaatgatgatactgttgcggggataagctgcaatgatatttcagcatattcagttcaatatcatcctgaagccagtccaggaccacatgattcaagatatgtcttcaaagaattttttaatatgatgaaaaacgatgccaaaacgtaa

SEQ ID NO: 319394 - DNA, 691 bp, Unknown
  Bacterial polypeptide expressing nucleotide sequence isolated from the Sargasso Sea
catgcaaaaattaaaaaaggctatcctgtttctagaggatggccttttttttatcggaaaaagtcttggtgaaagtggagaaactttcggtgaagtttgcttcaatactggaatgactggatatcaggaaatattaaccgatccctcatattctaatcagatgattgcaatgagcagtccacatataggaaattatgggaccaataatagcgataccgaatcagaaagagtttatgctacaggatttataattaagagcgaatcaatacaaccttcaaattggaggtctgaagaatctctatcatcttttttaataaaacataatatagttggcattcaagatattgatacaagagcattaactatacacataagaaaaaaaggtgcaatgagaggaattatttcaacggaagattttgacactcataatttggccagcaaaattaaaaatattcctaaaatggaaggtcaagacttagcaattaaagttgccagaaagaaaaaagtggttttatcaaatactgataatcctatttataaaatcgcagcaattgattttggcatgaaaagcaatatatatgacattatgcttgaacacgatgcagaagttgaaatctttccagcaaatgtaacccacgatgaaatacttgcttctaatccagatggtgtgtttttatcgaatggacctgga

SEQ ID NO: 319395 - DNA, 889 bp, Unknown
  Bacterial polypeptide expressing nucleotide sequence isolated from the Sargasso Sea
aatgtcattcaaggcaattttagcatttgaagacggaagtgtattccatggaaggggttttgggaaagagaaatttgatgtaggtgaattagtcttcaatacatcaatgactggttatcaagaaattattacagacccgtcctataaaaaacaaattattacatttactcatcctcatataggaaataccggaatcaattatgaagacatggaatcaaacatcattcatgcttcaggcatagttgtaaagaattattgttctaaaccaagtaattggagatcaaaagcctcgttggaggattttttaattgagaacgaagttataggaatatcagaggttgataccagagaaattacaacactcttaagagaaaagggagctatgaattgctgcatagcatcttcatcactgataactaaagaagaggcaatctcagcagctaaagattttgatggccttaaaggaatggatttagcaaaagtagtatcaacacaatcaaaatatgaatggaataaaggcatttggcctcaaaataaaaagtctgatgaatctttttcagttgttgcatatgattatggtattaaagagaatattttaaggcttttgactgagcatgttggaaaagtgcatgtagtgaatgccaaaactccatttgaagaaattattaagttaaatccaaaaggtatttttttatccaatggcccaggcgatccagagccttgtgattatgctattgaaaatataaaaaaatgtttaatgctaaagcttccaatttttgggatatgtcttggccatcaattattggcgcttgcaggaggtgccaaaacatataagatgaaatttggtcaccatggggccaatcatcccgttcaagatatcatgactaaa

SEQ ID NO: 319396 - DNA, 1123 bp, Unknown
  Bacterial polypeptide expressing nucleotide sequence isolated from the Sargasso Sea
atgtcattcagggcaattttagcatttgaagatggaagtgtattccatggaaggggttttgggaaagagaaatttgatgtaggtgaattagtcttcaatacatccatgactggttatcaagaaattattacagacccgtcatataaaaaacaaattattacatttactcatcctcatataggaaataccggaatcaattatgaagacatggaatcaaacatcattcacgcttctggcatagttgtaaagaattattgtgctaaaccaagtaattggagatcaaaagcctcgttggaggattttttaattgagaacgaaattataggaatatcagaggttgatacaagagaaattacaacactcttaagagaaaagggagctatgaattgctgtatagcatcttcatcactgataaccaaagaagaggcaatctcagcagctaaagattttgatggccttaaaggaatggatttagcaaaagaagtatcaacagaatcaaaatatgaatggaataaaggcatttggcctcaaaataaaaagtctgatgaatctttttcagtggttgcatatgattatggaattaaagagaatattttaaggctcctcactgagcatgttggaaaagtacatgtagtgaatgctaaaactccatttgaagaaattattaagttaaatccaaaaggtatttttttatccaatggtccaggtgatccagagccttgtgattatgctattgaaaatataaaaaaatgtttaatgcaaaagtttccaatttttgggatatgtcttggccatcaattattggcgcttgcaggaggtgccaaaacatataagatgaaatttggtcaccatggggccaatcatcccgttcaagatatcatgactaaagatgtttttataaccagccaaaatcatggttttgcagttgacgaaaagaccttaccctcaaatattaaagttacacatttatctctttttgataaatctttacaaggcatagaatttactgatgcccctgcattcagttttcaaggtcatcctgaagcaagtcctggccctcaagagatacaaattctttttagaaaattcagtttaatggtaagagagcatgccaaaacgtaaa

SEQ ID NO: 319397 - DNA, 904 bp, Unknown
  Bacterial polypeptide expressing nucleotide sequence isolated from the Sargasso Sea
atgcttaattatcaaaacggttatttaatttataacaaaaaatatattttcaaaggtaagtttctatcaaaagatcaatttaagatagcagaaatttgcttcaatactagtatgacggggtatcaggagatattaactgatccctcatataaatctcagtttataaattttacctttccattgattggtattgttggatgtaataatgaagattacgagtcatggaaaatacacgcatctggtttaatatgtaatgaattatttgaattaagttcaaattggagagcacaaacaaattttacaaattggatcacaagtcaaaattcttgtgctttttttgatttagatacaagagccgtaactaaaattgtaagaaattttggaccaaaaaatataatgctatgttctgaggaatattttgaaaacaaaggaatagagcaaatttgtaaccaaatagatcaaagtctttctttagaagagaatgatgttatcaaagattttacatctgaactgaacatagaaaaacaagaaataggtaaaaaaaagtactcaatagcttttttaaattttggagcaaaagacaacattaagaagaacttatactctagaaattgtatggttgaagaatttaatatgaattttaaagctaaagatataattaataagaattttgatggtttttttttaagtaatggcccaggtgatcctaaaaaagtatatgaaaatataaaacctgaattaaataaattactaaataaaaaaatacctacttttggtatttgtcttggtcatcaaatattgagtttagcatttaatgcctccactgctcgaatggaaaaaggacatcgaggtggtaatcacccagtaaaaaacttggaaacaaacaaagtgaaattacatctca

SEQ ID NO: 319398 - DNA, 1093 bp, Unknown
  Bacterial polypeptide expressing nucleotide sequence isolated from the Sargasso Sea
aatgaagtttgcagcaaagctcctactagaaaatggaatttcatttgaaggtattggttttgggtttcaaaaaattggtgttggtgaagtagtttttaatacagcaattacaggctatcaagaaattcttaccgatccatcttacgacggtcaaatcataactttcacctatcctcacattggaaacactggaattaattttgaagataatgaatcaaaaaaaattgctgcaagaggcttaattgttaaaaatttctgtgattttccaagcaactaccgttcaaaaatgtctttggaggattttttagttgaacaaaaaacgatttgtatatcggatatagacacgagacatcttacaagaattttaagggatgagggttgtaaaattggagccatatatccaactaaacttttcactgatgaagaagctgtttctgaaataaagaaatttggttctatgtcagataataactttattgaaaatgtggctgtttctgagtcttatgcttatggagatccaaaaaccaagaaaaaatttaaaattgcagcagttgattttggtgtaaaggaaaatatcttacggatcatgaaagatatgggaggggatattactgtcatgccgccaactacaacagcaaaagagatggctgctctaaaacccgatggaatttttttatctaatggtcccggtgatcctaaagttttaacttcagctgttgaggaagtgaaacaaatgatgaaactggagataccaatctttggaatttgtctaggtcatcaaatcatgtcattggcctacgatttgaaaatagaaaaaatgccttttggtcaccatggcgccaatcaccctgttcatgatttaaaaaataatacagttttcattacttctcaaaatcataattttgcagttgcaaacattgaagacaggagcgatgtggttgttacgcacaggtctttatttgatggctctatacaaggtattgagcataatgacaaaccattttattcaattcaatgtcatcctgaagcaagcccaggaccaaaagaatttgaggtattgtttgagagatttttcgaggatatgaatgcctaa

SEQ ID NO: 319399 - DNA, 487 bp, Unknown
  Bacterial polypeptide expressing nucleotide sequence isolated from the Sargasso Sea
gtggtcgttttcctgcacaagttctgcagatgagatccttgagcacaaacctgatggggtcttcttatctaatgggccaggtgaccccgcggctactggtaaatatgctgttcctgtaatccagcacctattaaagaatactgatctgcctatctttggaatttgcctaggacaccaaatgttagcacttgctctaggcgctaaaacaataaaaatgaaccatggtcaccatggcgcgaaccatcctgttaaagagcacagttctgggaaggtagaaatcacgtcaatgaaccacggttttgcagtggatgcccaaaccctacccagtggagttgaagagacacacgtttcactcttcgatggctcaaactgtggcataaagatgtcagacagacctgttttttctgtgcaacaccacccagaggctagcccgggaccccaagatagcttttacctattcaatcaatttgttgccactatggaataa

SEQ ID NO: 319400 - DNA, 1081 bp, Unknown
  Bacterial polypeptide expressing nucleotide sequence isolated from the Sargasso Sea
ttgaatcaaaatggtgatgaatttctaggttggacaactgagtcatttaagccaacaactggagaacttattttcaatacagcgatgactgggtttgtcgaaatattaagtgatccatcatatataaatcagattgtaacttttacttcctcacatataggaaattacggtatgtcaaaaaatgattttgaatctaataaaccaaaaattgaagcagccattggaaattcttttacaaactctccatcttcatggcgatctgagaaatcaataacgtcatggttgaaagaatatgagattccatacagtggtggatttgatgtaagaaatataacaaaatatctaagagacaatggttcgagtatgtttgcacttggtatagatgttgatacaaaagatttaaatgaaattttgtcaaaagcaaaaaatattcttggtgatagttcagcaatgactgcaggtaaccagaataatgaaaacactccaactgaaggaaagattggaattatagatctaggagctaaaagaagcattataaaagtgcttgaagacaatgattacaaagttgtaatgatctcaccctctacaacaccaaatgagattttaaaaatgaatttaaaaggtcttttaatttcgaatggaccaggcgacccaagatcattggttacagtaatagatactgttcaaaaccttataggaaaacttccaatatttggaatttgtcttggtcatcaaatacttggtttggcttgtggtcttgaagttaaaaaaatgcagtttggtcatcatggttcaaatcatccagttgaaatagagggaataaaaaaagcactaataaccgcacagaaccatggtttctctattgaggagtttggagatgggtttgagcatgaaaattttggaaacattaatgtttttgcaaggaatttaaatgatggaacaaatgaaggaattagcctgtgggaatctatggcgtactcagttcaatttcatccagaatcaggacctggtacaactgatggattgcaaatttttaatcctttttttgaaatgattgagaataactatgccaaaaaataaa

SEQ ID NO: 319401 - DNA, 817 bp, Unknown
  Bacterial polypeptide expressing nucleotide sequence isolated from the Sargasso Sea
attgaaagatgcttatttacttttaagtaataacgaatgtttaaagggagtgtcaataggttactcaggatctacatttggtgaattggtttttaatacatcaattacaggctaccaagaaatcatttctgatccatcttataaaaatcaaattatcacatttacatatcctcatataggcaatgttggatttaacataaatgattacgaggcaaatgatacttatgttaatggtgttgttgttaaccagcttccaacaaatccatctaactggcgagctgagtcatcttttagtgactttttaatcaagaacaaaattatttgtatcgctgatattgatactagatatttaacaagcatgttaagagacaaaggatcattaaatgcttgcatttcaacagaagttaaaaaaattaactccttacaagataagctaaaaaaatataacggaattataggtatggatttagcaaaagaagtaagcaccaaaaagtcttatttttttaatgaaaaaaattattacgttgataataaaaaaataaaatctaaacaaaaatacagtgttgtagcttatgattttggtattaaaaaaaacattttaaaaatactaaaagatctaggctgcaaaacaaaggtaatacctgcaaatactaaagcaaaggatgttcttaatatgaatcctgacggtatattcttatctaatggacccggcgatcctgctgcttgcaaatatgcaatagactccataaaggaattttataaacataatattccattatttgggatatgccttggacaccaactcatgggaatagcc

SEQ ID NO: 319402 - DNA, 1195 bp, Unknown
  Bacterial polypeptide expressing nucleotide sequence isolated from the Sargasso Sea
ttgaccaaaaaagtaaaaaaaactcacaaaaaaaattcacaaattaatacaggcgttttagttcttgaaaacaaaaaggtttttaagggtattggaattggttatcaaggagaagcaacgggcgaggtttgttttaacacttcattaacagggtaccaagaaattatatctgacccatcttatgcgggacaaattattaactttacattccctcacattggaaatgtagggactaacaaagaagattttgagtctgataaaatatggactaaaggagtagttattaattcagaaatatcttcgccgtcaaattatagatcttttcaacatttagatgcttggctcaaaaaaaataaaatagttggaattacaggattagatacaagaagtttaaccaatttaattagagaaaaaggtgctccgaagggaactgttgctcactcaaaaaaaggtaagtttaatatcagtaaacttaccaactcaacaataaaatggagtggattaaaaaatttagatcttgcagaaaaagtaaccacaccaaaaaattatatttggaaaggtcataaaacatggaaaaaagaattaggttataaaaaaaatagtaaaaattcttttcatgtagttgctatagattatggaattaagaaaaatattctaagatatttttctgacttcaagtgtaaagtaactgtggtttcatgtaaaacatctgctgaaaaaattttagcccttagacctaatggtatatttttatcaaacggtcctggagatccagcagcaactggaaaatatgcgattaaaataatcaaaaatctgattaaaaaaaacctaccattatttggtatttgtcttggacatcaaatactagcgttaacattaggtggtaaaacaaagaaaatgaaactgggacacaggggtgcaaaccatcctgttaaaaatttaatcaatgacaatgtagaaatcactagtcagaatcatggttttgaagtagtcaaagaaaatttaccaaaaaatattgaggttactcataaatctctattcgataacagtattgaaggtataaaactaaaaaataaacctgtgttttctgttcaataccatccagaatcaaaccctggaccacaggatagtgtttatttatttcaagaatttattaacaacatgaaaaaaaatgccaaaaagaaaagatcttaaa

SEQ ID NO: 319403 - DNA, 1195 bp, Unknown
  Bacterial polypeptide expressing nucleotide sequence isolated from the Sargasso Sea
attgatcaaaaaagcaaaaaaaacaaactcaaaaaattcacagattaatacaggcgttttggttcttgaaaacaaaaaggtttttaagggaattgggattggctatcaaggagaagcaactggagaagtttgctttaatacctctttaaccggttaccaagaaataatttcagatccatcttacgcaggtcagattataaattttacttttcctcatattggaaatgttggaactaataaagaagatgtcgagtctgataaaatttggacaagaggagtaatctttaactcagaaataacttctccttcaaattatagagcatttttgcatttagatgcctggctcaaaaaaaataaaattgtaggaattacaggtctggacactcgaagtttaacaaactttattagagataaaggggcacctaagggaacaattgcttactcaaaagatggaaagtttaatgttaacaagttaacaaattctaccattaaatggagtggtttaaaaaaccttgatcttgcagaaactgtcacaaccgcaaagaactacatttggaaaggacttcaaacttggaagaaagaaataggatataaaaagaatacaaaaaacctttttcatgtagttgcaattgattatggaataaaaaaaaatattttaagatatttttcagacttcaaatgcaaagtaacagttgtttcttgtaaaacttctgcagaaaaaattttaaatcttaagccaaatggaatatttttatctaatggtcctggtgatccagcagctacaggaaaatacgcaatagaaatacttaatgaattaatcaaaaaaaatttacctatatttggaatttgtttaggtcatcaaattttagctttagccttaggtggtaaaacaaaaaaaatgaagttgggccacagaggagctaatcatcctgttaaaaatttagtccacgataaagttgaaatcaccagtcaaaatcatggttttgtagtggttgaagaaactttacctaaaaaaattgaagtaactcataagtctctatttgacaacaccattgagggaataagacttaaaaacaaaccaatattttcagtacaatatcatccagagtctaaccctggaccacaagatagcgtctacctctttcaagaatttattaacaacatgaaaaaaaatgccaaaaagaaaagatattaa

SEQ ID NO: 319404 - DNA, 1162 bp, Unknown
  Bacterial polypeptide expressing nucleotide sequence isolated from the Sargasso Sea
atggaggtcgcgttgacaaagtctgccttactcgtactcgaagatggaaccgtattcactggcacagcaattggtgccgatggtctctctgttggtgaagttgtttttaacacttccatgacaggataccaagaaattttaactgatccctcttattcacgccaaatagtaactttaacctacccccacattggtaacactggtaccaataatgaagacgtcgaatccaatggggttcatgcttgtggtttaatcattcgcgatcttccactcgtagcaagtagtttccgcaatcagcaaaccctcagtgattatctcaaagcaaacaacgttgttggcatcgcagatatcgatactcgtaaattaactcgaatcctccgtgaaaaaggtgcccaagcgggttgcatcatggcgggtgctgacttagatgaagcgaaagcactggctgcggctaaagccttcccgggtttaaagggcatggatttagcaaaagaagtgactactgataaagcctacccatggcgtaaaggtagctggcgtttagtgggcggcttacctgaggatacgccagccgaagcgttgaagtacaaagtcgttgcctacgattatggtgttaagcaaaacatcctgcgtatgttggttgaccgtcgctgtgacgtcaccgttgttccggcaaaaacatcggctgctgaagtgttagcgatgaacccagacggtgtgttcctctctaacggccctggcgacccagagccatgcgactacgctatcgaagcgattcaacaaatcctgaaaaccgatacgccgattttcggtatctgtttaggccaccagttactggcattggcatcaggcgcgaaaaccttaaagatgaagtttggtcaccacggtgctaaccacccagtgagcaatatcgaaaaaggtaacgtgatgatcaccagccaaaaccacggttttgctgccgatgaagccacattacctgccaatatcaaagtgactcacaagtcactgttcgatggttcactgcaaggtatccatctgacggacaagcctgcgtttagcttccaaggtcaccctgaagcgagcccaggtccgaacgatgcggccccactgttcgatcactttatcgagcttattgaacaataccgtcagaacgctaagtaat

SEQ ID NO: 319405 - DNA, 1165 bp, Unknown
  Bacterial polypeptide expressing nucleotide sequence isolated from the Sargasso Sea
catggtaaattgggtttcaaaaaaaccaacgggcgcattaattttaaatgatggtactattttcaaaggttttggatttgggactataggaagatcttctggagaagtctgttttaatactgcaatatcaggctaccaggaaatcatgacggatccatcttattgttcgcagataataacttttacatttcctcatataggcaatgtcggcctaaatttagaggataatgaaagttcagaccgaccttatattagcggtgcagtctttagatccctaataactgacccttcaaattggagatctgaaattaatctagacaattggctaaaggataattcaatagtcggtatttatggaatagatacaagagctctaactaatttaattagagaaaaaggccttataaatggtactatagtacacaataataatggtattgaagaatttgaagattatttagaagatactaaaaagtttaaaggaataaatgatcaagaccttgctaaacttgtaacctgtaaagaaacaatcttatgggatgaaaaagaaatcaatatttataacagtaagattaaaagaaaaaaaattaatgctcatgttgttgttgtcgattatggagtgaaaaaaaatatattaagatgtctatcttcaagatttaaaaaaatatcattggttccttgcacttcatcatatagtgacataattaatttaaaaccagatggagttttcttatcaaatggtcctggcgatccaagtgctactggaatatatgcaattcctgtaatcaaacaactaattgactcaaatataccaatatttggtatttgtctcggtcatcaattacttgcattatcattagggttggagacatataagatgcaccaaggtcatcatggggcaaatcatccagtaaaaaataattatgactcaagtgtaagcattacatccatgaatcatggttttgctgtaaggagtgataatttacctgaaggtattatagaaactcatactagtttatttgatggtagcaattgtggaattgaaatgattaataagccgattttttcagttcagcatcatcctgaagcatcccctggaccaaatgatagctattatttatttgataaatttttagaaaatattgagaaacatacgaatgcctaa

SEQ ID NO: 319406 - DNA, 1099 bp, Unknown
  Bacterial polypeptide expressing nucleotide sequence isolated from the Sargasso Sea
atgaaaaaaattaaaaacacacaagaaaaagaagctgttcttttactagatgatagaagactatttagggggagagtatttggagcaataggggaatcaataggggaggtttgttttaacacaggaatgaccgggtatcaagaaattttaacagacccatcttatgcaaaacaaatggttacaatgaccgcaccacatattggaaattatggcataaacagcgaagatgttgaatcagaaaaaatacaggtttcagggtttataattaaagaggaatcatttattccatccaactggcgatcagaaatttctctagcagaatatttaaagaaacagaacgttgttggtataaaaaatatcgatacccgggctctcacaaaacacataagagacaatggggcaatgaacggcattatatcttctaaaactgttaacatagatgagctagcaaataaattgaatgatgcgccttcaatggaaggattagatttagctaaaattgtttcaacaaaaaaaatctatcagtggtctgaaaagggaaggtacaagatagcagcaatcgattttggtataaaaaagaatattttaagattgctagaaagttttgattgcagtgtgacagtctttcctgcaaaaactaaagcacatgagatcttatcttatgacccagatggggtgtttctatcaaatggccctggagatcctgcagctgttggatatggtattgagacaataaaaaaactccttggagtgaagccaatatttggaatatgtctagggcatcaattgctagctttagcactaggagcaaaaacattcaaactaaaatttggacatcgtggtataaatcacccggttaagaatattaacttgggggcaattgaaatcaccagtcaaaatcatggctttgcagttgaacttgatagcttaccaaaaaatattttgtctactcatattaatctgaatgataatacctctgcgggaatcgagtgtgttgatcatcctgctttttcagttcaatatcatccagaatcaagcccaggcccgcatgatagtcgttatctattcaaaaaatttattggaatgatggatgcctaaa

SEQ ID NO: 319407 - DNA, 841 bp, Unknown
  Bacterial polypeptide expressing nucleotide sequence isolated from the Sargasso Sea
tttgtctgaataccttaaagcgaaaggcgttgtgggtattgccgacattgatacacgtcgcttaacgcgtatcttgcgagacaaaggtgcacaaaacggctgcattatttgctctgatgaattagacgagtctagcgcactagcgcaagcaaaagctttccctggccttaaaggcatggatttggcaaaggtagtaagtattactgagccaaaaacatggacagagggcagttgggaacttggtaaaggttatgtaacaccaagcgagttcaaatatcacgttgttgcttttgactacggtgttaaaaataatattcttcgcatgctagctgaccgcggttgtaaagttacgttagtaccagcgcaaacgcctgctgaagacgtactagccatgaatcctgatggtgtatttttgtcaaatggcccaggcgacccagagccatgtgactacgcagtaaccgcaatcaaaactatcgtcgaaaccggtacgcctgtatttggtatttgtcttggtcaccagctacttgctatcgcaagtggtgcgaagacagtgaagatgaagtttggtcaccacggtgcaaaccacccggttaaagaccttaagcgcaatgtagttatgatcactagccaaaaccacggttttgcagttgatgagtctagcttgccagataacctagaagtaactcacatttcgttgttcgacaagtcgctgcagggtattcaccgcaccgacaagcctgcgttcagcttccagggtcaccctgaagccagcccaggtcctcatgaagcggcaccgttattcgaccacttcatcgaacttattgaacaacacaagcagtag

SEQ ID NO: 319408 - DNA, 1081 bp, Unknown
  Bacterial polypeptide expressing nucleotide sequence isolated from the Sargasso Sea
atgaaaaaaaatagcgcaatactattactagatgacggaagaaagtttattggaaaatcttttgggtttattggagaaacgattggagaagtgtgctttaacacgggaatgacaggttatcaagaaattctcaccgacccctcttattgtaagcaaattgtaacaatgacatcaccacatatcggtaattatggaattaatgaggaagatgttgaatcaaaaaaaattcaggtttcaggatttatcattaaggaagaaacactaataccttccaattggagatccgttgcttcaattggcgattatttaacaaaaaataaaattgttggcattcagcaaatagataccagggccttgactcgccatataagggataatggagcgatgaatggcattatttcatctctggatagcaacattaaaagtttatcaggaaaattaaaaaaagctccatcaatgaatggccttgatctagcaaaaaatgtaagcactaaaaaagtctatcaatggtcatcaaaagggaaatacaatgttgcggcaattgattatggtataaaacataatattttaaaactattggcagataacaattgtaaaattacggtgtttccagcaaaaacaactgctgaggaaataattgaatttaatcctcaaggggtatttctaagcaatggtcctggtgatcctgcagctgtagcatacggcattgaaatggtcaaagaactattaggcaaaaaaccgatttttggtatatgtctcggtcatcagattttatctttagcccttggagctaaaacgtttaaactgaaatttgggcataggggaataaatcatcctgtgaaaaatatgaattcaggtatcgttgaaatcacaagtcaaaatcatggatttgcagtggatcttaattctttgcccaaaaatgtaaaatcaacccatataaatttaaatgacaataccagcgcaggaattgaatgtgaggagctacaagccttttctgttcaataccaccctgagtcaagtccgggccctcatgatagtagatatttatttgataaatttattgatcaaatgaaaggttagt

SEQ ID NO: 319409 - DNA, 472 bp, Unknown
  Bacterial polypeptide expressing nucleotide sequence isolated from the Sargasso Sea
atgaaaaaagattcaatactttacttagaaagtggaatttcctttacagggagttcatttggatatgatagtgaagcgataggcgaaattgtatttaatacttcaatgactggttatcaggagataattaccgatccctcatatgattctcaaattgtccttatgacttatcctcatattggaaactatggaactaatgagatggatattgaatcgaataaaagttcagctaaaggccttattgccagagagttttgtgattatccatcaaattttgaatctacagcaaaactttctgagtacttaaataaaaacaagattgttggaatatctaatatagatactagaaaattaacaaaaattatacgaaaccaaggatcacagaaatgtattatatccaacagatcaaatgatattgattatctaaaatctcaacttgaaactttacccgttatggagggtaacgatttaa

SEQ ID NO: 319410 - DNA, 1195 bp, Unknown
  Bacterial polypeptide expressing nucleotide sequence isolated from the Sargasso Sea
ttgaaagaaaaacacaaaaataaaattgcaattaaatcaaaatttccttcagctattttaattttagataataaaacgatcttcagaggtattgggcttggttatcatggggaagcaactggggaggtttgttttaatacatctttaacaggttatcaggaaattatatctgatccatcttatgcaggacaaataattaacttcacttttcctcacattggaaatgttggaactaataatgaagacgtagaatccgacaaaatttggacaagaggggtaatatttaattctgaaataacaaatccgtcgaattatagatctctaaaacatttagatgaatggcttaaaaaaaataaaattgtgggtattacaggacttgatactagaagtttgaccaactttattagagataaaggcgctcccaaaggcactatttcaaataataaatctggcagatttaatattaaaaaactcattaaaaaaacaactatttggcctggtttaaaaggaatggatcttgcgcaggaagtatcaacaagaaagaattatacttggaaaggccttaagacatggagcaaagaagaaggttataaaaaaaataacaaaaaaaaatttagagttattgcaatagattatggaattaagaaaaatattttaagatacttttctaactttaattgtgaagtaaaggttgtatcttgtaaagaaagtgctgaaaatttattaaaactaaaaccacatggaatatttttatccaatggtccaggtgatccagctgctactggcaaatatgcaatttcaactgttcaaaaattaatacaatcaaatcttccagtttttggaatttgtctaggtcatcaaattttagcattagcgttaaatgcaaaaacaaaaaaaatgaaattgggacatagaggtgctaatcatcctgtaaaaaatttaatttcaaagaaggttgagattacaagtcaaaatcatggatttgaagttgttaaagagagtttaccaaaaaatgttgagattactcatagatctctatttgataactgtatagagggaattaaattaaaaaacaaaccagtcttttctgttcagtatcatccagagtcaaatccaggtccacaggatagtcactacttatttaataactttattaatgagataaaaaaatatgccaaaaagaaaagacattaaa

SEQ ID NO: 319411 - DNA, 1123 bp, Unknown
  Bacterial polypeptide expressing nucleotide sequence isolated from the Sargasso Sea
atgtctttcaaagcaatattagcttttgaagatggtagtgtattctatggtaagggttttgggaaagaaaaatttgatgtaggagaactagtctttaatacctcaatgacaggttatcaggagataataaccgacccatcgtataaaaaacaaatcattacattcactcaccctcatattggaaatactggaattaatcatgaagacaatgagtcaaatattattcatgcgtctggaattgttgttaaaaatttttgtgagaaaccaagtaattggaggtcatctagcacgctagatgagtttttaattaaaaatgagacgatagctatatcaaacgttgatacaagagaaataacttcaattttaagagaaaagggtgcaatgaattgttgtataggttccctatcaatgatttcagaagatgatgcaatatttgctgcaaaagaattttctggattagagggaatggatcttgcaaaagttgtatctacaaagtcagattatatttggaataagggtacttggcctcaaaataattcttctaaagaatctcataacgttgttgcttatgattttggcattaaagaaaatatactaagacttctcaatgagcatctcggagaggtaaaagttattaatgctgaaactccatatgaagaaattattaaactatcaccaaatggaatatttctatcaaatgggccaggagaccctgagccatgtgattatgcaataaaaagtattaaaaaatttttaaaagataaaattcctatttttggtatttgtcttggtcaccagcttctttcattggctggaggtgcgaatacttataaaatgaaatttggacaccatggtgcaaatcatccagtacaagatattgaatcaaaagaagtttatataacaagtcaaaatcatggatttgcagtagatgcagatactctaccaaaaaatataaaaattacacatatttctctttttgataaatctcttcaaggcattgaatttatagattctcctgcatttagcttccaaggacatcctgaggcaagccctggccctcaggaaattcaaaatctgtttaaaaaatttagtttgatggttaaagaatatgccaagacgtaaa

SEQ ID NO: 319412 - DNA, 625 bp, Unknown
  Bacterial polypeptide expressing nucleotide sequence isolated from the Sargasso Sea
tgagttagcatctaaagtttcaacgaaaaaatcatatgaatatggtaataaagattcaaaagttagattagcagttatagaccttggaattaaaaataatattcttgaaaacttttcaagaagagggttatttgtaaaagtgtttccatacaacacggattttgaagaaatgttaaaatttaaaccagacggcttctttttatcaaatggacctggagatcctaagcctctgaccaaggtgataaacactacaataaaaattttggataaaaattatcctctttttggtatttgtttaggtcatcaagtaattgctcttgcaaatggtataaaaacatataagatgtttaacggccatagaggtattaatcatcctgttttaaatctaaatactggtaaaggtgagattacatctcagaatcatggttttgcagttgattataagacagcagtttctaataaatctgtaaaaatatctcatcaacacctaaatgatcaaacagttgcaggtcttgaaatcaaaggtaaagattgtttctctgtccaatatcatcctgaagcaggtcccgggccaaatgatggtaattatctttttgatcaatttctatctaagcttaataaatga

SEQ ID NO: 319413 - DNA, 1021 bp, Unknown
  Bacterial polypeptide expressing nucleotide sequence isolated from the Sargasso Sea
catgagcggctatcaagaaataataaccgatccatcttattgcaaacagattattacgtttacacatcctcatatcggcaatacaggtataaattctgaagataatgaatcagataatatatatgctgaaggagttgttataagaaattatatctctcagccaagcaactatagatctgaagaaaatcttgatgatttcttggcaagaaataattctattggaatttttggaatagatactagacaactaacaattattttgagggaaaaaggctcattgaaagcatgcattagtccgatagatgaaaataatgaacaatcagcaatatctttagcaaaaagctttgatggtctcgagggaatggatttagcaaaagaagtaacaacgaaaaatttatattcttggaatgaaggagtctggcctgattataaagagttaaaaagcaagctgcatatcgttgcatatgactatggaattaaaaagaatattttaagacttctctctgagcatgttgggaaagtaacagttgtaaatgcaagatgctcctttgatgaggttctaaagatgaatccagatggcatctttctatcaaatggacctggcgatccagagccatgcgcttatgctattgaaaatattaaaagggcacttaatgaaaatattcccatatttgggatctgcctaggtcaccagctgttagcacttgcgggtggagcaaagactgaaaaaatgaaatttggtcatcatggggcaaatcatcctgttcaatctttaaactctaaggaagtgttcataacaagtcaaaatcatggctttgctgtaaatgaggattcattgccagataatattgagatttctcatgtatcactctttgatcaatcaattcagggtatttcatttaaagataagcctgcatttagttttcaaggacatcctgaagcaagcccaggcccccaagatatagttagtttatttaagcaatttaaagaaatgatagataaaaatgccaaaaagaaatga

SEQ ID NO: 319414 - DNA, 643 bp, Unknown
  Bacterial polypeptide expressing nucleotide sequence isolated from the Sargasso Sea
atggaaagttttaaaacttggagaaaagagactgggtacaaaaaaaataccaaaaaaacatttaagataatagcaattgattatggtataaaaaaaaatattttaagatatttctctgattataattgtgatgtaaaagtagtttcttgcacgacaaccgctgaggagatttcaaaattgaaaccagatggaatttttttgtcgaatgggccaggagacccggcagcaactggtaaatatgcaattaaaactatacaaaaattgattaaaaaggattacccaatatttggtatttgtttgggtcatcaaattttagcattggcattaaatgctaaaacaaaaaaaatgaaattgggtcatagaggggcaaatcatcctgtaaaaaatctaatcaacaacaaagttgaaattacaagccaaaatcacggtttcatcgtaatagaaaaaagtctatcaaaaaaagttcaaataactcacaaatcactttttgataatactattgaaggaataagattaaaaaacagacctattttttcagttcaataccatcctgaggcaaatccaggaccacaagatagtcaatatttatttaaaaattttattcaagatgtaaaaaaatatgccaaaaagaaaagacattaaa

SEQ ID NO: 319415 - DNA, 414 bp, Unknown
  Bacterial polypeptide expressing nucleotide sequence isolated from the Sargasso Sea
caggggcctatgctattcaaacaattaaaacattaataaaaaataatcttccgatatttgggatatgtttaggtcatcaaattttagctctatctttaaatgcaaaaactaaaaaaatgaaacttgggcacagaggagcaaatcatcctgttaagaacctaattaatagtaaagtagaaataacaagtcaaaaccatgggtttgaagttattgaaaatagcttatcaaaaaatattcaaataactcataagtctctttttgatggaagtattgaaggaataaaattaaaaaataaaccaattttttcagtgcagtatcatccagaagcaaatccaggaccacaagatagtcattatttatttggtgattttgtaaaagaagtaaaaaaacatgcccaaaagaagagacattaaa

SEQ ID NO: 319416 - DNA, 784 bp, Unknown
  Bacterial polypeptide expressing nucleotide sequence isolated from the Sargasso Sea
gctccaaaaggaacgatacaatttttaaaaagaggcgaacataacttaaaaaaacttttaaaagaggcaagatcctggaatggattactagggttggacttagctaagaaagttacatgtaaaaaaatttataagtggaaatcttttaagtcttggaacaagaaaagtgggtacattaaaaataggagaaataaatatcatattgtagcaattgattatggaattaaaaaaaatcaattaagatgcttttctgatataaattgtggagtcactgttgttccagcaaatttttctgcagatgaaataataaaactcaagcctcatggagtttttttatcaaatggtccaggtgatcctgcagcaaccggtaagtatgcgataccaataataagaaaattaattaaaaataaaataccaatttttggaatctgtttaggacatcaaattttgtctttagcgctaggagcaaaaactaaaaaaatgtcactaggtcacagaggtgcaaaccatcctgttaaagatctaaccacaaataaagttgaaattacaagccaaaatcatggttttgaagttgatgctaaatcaattcctaaaaatgtaaacgtcacacacaaatctctttttgatgggtctattgagggcatagaggtaaaagataaaaaactattttcagttcagtatcatccagaagctaatcctggaccacaagatagtaaatatttattcgaaaaatttttaaacaacataaaattaaataaaaatgggaaaaagaaaagatattaaa

SEQ ID NO: 319417 - DNA, 579 bp, Unknown
  Bacterial polypeptide expressing nucleotide sequence isolated from the Sargasso Sea
atgatgagtatcctgtagtagcttacgactatgcatttaaagagaatatattaagacttttaagtgagcatgttggatctgtaaaagttgtaaatgccaaaactccattcgaagaaattattaaatataatccaaaaggtatatttttatctaatggtcctggagatcctgagccttgtgattatgctatagaaaacattaaaaaatttcttgaaaataagattccaatttttggtatctgtcttggccatcaattattagctcttgctggtggggctaatacttacaaaatgaaatttggtcatcatggagcaaatcaccctgttcaagacatggcctccaaagatgtttttattactagccaaaatcatggcttcgcagtagatgaaaacactttacctaaaaatattaaagtcactcatgtatctttatttgacaaatcacttcaaggcattgaatttatcgataggccggcatttagtttccaagggcatcctgaggcgagtcctggccctcaagagatacagatactttttgaaaaatttagttctatggtaaaagagtatgccaaaacgtaaa

SEQ ID NO: 319418 - DNA, 1165 bp, Unknown
  Bacterial polypeptide expressing nucleotide sequence isolated from the Sargasso Sea
aatgcagcgggatattattaaaaatcaacacctacgccctccttcagctgctttaattttcgatgatggtgaaatattgtggggtcatggcctaggtgcacttaaatctgttatagctgaattgtgctttaatacatcacaaacaggctatcaagaaactttgactgacccgtcatatgccaaacaaattattacatttacttttcctcacattggtattgttggtattaatgatgaagatttagagtctaataaaatttatgcagaagggtgtgttattaatcaatctattgaagaatattcaaactggagagcacaggatagcctaagttcttttctaaaaaaaaataatattccaggcattattggagttgacacaagatatttaacaagaaagttagctgtagatggtgctaaaaaagtagcgttaattcatttcggtgaaaaaaaagaaagtttcgataatttgcaacaaaaactcaaacaatggagtgggttagaaaatttagatcttgcaacatcagtatctgcaacaaatgaataccaatggaattatggtttatggaaacaaaatgttaaagataaaaagtatgataattttccaatagtttgcttagattttggcataaagcagaatattcttaggaatttaaaaaatttaaattttaatccgacaatcttaccagcaattagtcctactaaagagattttaaataaaaaacccaaagggatttttttatcaaatggtcctggagacccagacgcaacaataaaaataatacttccgactttaaaagagttaatcgatcttaaaattcctatattcggaatttgtttaggtcatcaactaataagtctagcgttaggaggaaaaacaaaaaaaatgtatcaaggtcataggggtgcaaatcagcctgttaaaaatttaattaacaataatgttgaaataacttcacaaaatcatggttttgaagttgaaagatcaagcttacctaatgaagttgaggaaacacatatctcattatttgatggctctaatgagggtataagacataaaatacatcctgtttttagtgttcaatatcatccagaggccagtcctgggcctcatgatagtgcatacctctttgaagaattttataatctagttaaaaaacatgcctaa

SEQ ID NO: 319419 - DNA, 1186 bp, Unknown
  Bacterial polypeptide expressing nucleotide sequence isolated from the Sargasso Sea
ttgaacaaaaagcaaaaagtaaactcaaaaaaattctcacatttatcatcaggcgttttagttcttgaaaacaaaacaatatttaaaggtattggtattggatatcaaggaactgcaacaggagaagtttgcttcaatacttctttaacaggttatcaagaaattatatccgatccatcttatgctggacaaattatcaattttacttttcctcatattggaaatgttggtacaaacaaagaagatcatgagtcagacaagatttggactaaaggagttatttttaatacggaaataactaatccatcaaactatagatctttaaaaaaattagatagttggttgaaaaaaaacaaaatagtaggaataactggactagatactagaagcttaactaattttataagagacaaaggtgcacctaaaggtaccatttctaataataataaaggtatttttaatctaaaaaaattaaccaatagctctattaaatggccaggattaaatggtcttgatttagcaaaaatagttacaacaaaaaaaaaatatttatggaaaggtttcaaaacatggaaaaaaggggaaggttttgaaaaaaataaaaagaagaaatataaaattattgcaattgattatggaattaaaaaaaatattttaagatatttttctaattttaattgtgaagtaattgtagttccttgtagtcttgaagctgaagatattattaaattaaaacctgacggtatttttttatcaaatggccctggagatcctgctgcaacaggaaaatacgcaataaatataattcaaaatttaattaaaacaaatattccaatatttgggatatgtcttgggcatcaattattagctttagcacttaaagcaaaaacaaaaaaaatgaaattaggtcacagaggtgcaaatcatccagtaaaaaatctaattaatagtaaagttgagataacaagtcaaaatcatggattcgaagttgttaaagacagcttgcctaaaaatgttgaaatgactcacaaatctttgtttgataattctgtagaaggaataaaattaaaaaaaaaacctgttttttctgttcaatatcacccagagtcaaacccgggacctcaggatagccattatttatttaatcaatttattaatgaagtaaaaaaaaatgccaaaaagaaaa

SEQ ID NO: 319420 - DNA, 682 bp, Unknown
  Bacterial polypeptide expressing nucleotide sequence isolated from the Sargasso Sea
aagctttgatggtcttgagggaatggatttagccaaagaagtaacaactaaaagtttatattcttggaacgaaggagtctggcctgattttaaggagtcaaaaagcaagctgcatatagttgcatatgactatggaattaaaaagaatattttaagacttctctctgagcatgttggtaaagtaacagttgtaaatgccagatgctcttttgatgaggttctaaagatgaatccagatggcatctttttatcaaatggacctggcgatccagagccctgcgattatgctatcgaaaatattaaaagggcgcttaatgaaaatattcccatatttggaatctgcctaggtcaccaactattagcacttgcagggggagcaaagactgaaaaaatgaaatttggtcatcatggggcaaatcatcctgttcaatctttaaactctaaagaagtattcattacaagtcaaaatcatggctttgctgtgaatgagaattcattgccaaataatattgagatttctcatgtatcactttttgatcaatcgattcagggtatttcatttaaagataagcctgcatttagttttcaaggacaccctgaagcaagtccaggtccacaagatattgttagtttgtttaagcaatttaaagaaatgatagataaaaatgccaaaaagaaatga

SEQ ID NO: 319421 - DNA, 1195 bp, Unknown
  Bacterial polypeptide expressing nucleotide sequence isolated from the Sargasso Sea
attgaacaaaaagcaaaaagtaaactcaaaaaaattatcatatataccatcaggcgttttagttcttgaaaataaaaaaatatttaaaggtattggaattggatatcaaggaacagccactggagaagtttgtttcaatacttctttaacaggttatcaagaaattatatccgacccatcttatgccggacaaattattaattttacttttcctcatattggaaatgttgggactaacaaagaagatcatgagtcagacaaaatttggactaaaggtgttatttttaacactgaaataactaatccatctaactacagatctttaaaaaaattggataattggttgaaaaaaaataagatagtaggaataaccgggctagacactagaagcttaactaattttataagagacaaaggagcacctaaaggtactatttctaataataataaaggtatttttaatctaaaaaaattaaccaataacgctattaaatggccaggattaaacggcttggatttagcaaaaactgttacaacgaaaaaacaatatatatggaaaggtttcaaaacatggaaaaaagataaaggttttgaaaaaaataaaaagaacaaatataaaattattgcaattgattatggaattaaaaaaaatattttaagatatttttctaattttaattgtgaagtaattgtagttccttgtcaccttgaagctaaagatattattaaattaaaacctgatggtatttttttatcaaatggccctggggatcctgctgcaacaggaaaatatgcaattaatattattcaaaatttaattaaaacaaatattccagtatttggaatatgtcttggacatcaacttttagctttagcgcttaaagcaaaaacaaaaaaaatgaaattgggacacagaggtgcaaatcatccagtaaaaaatctaattaatagtaaagttgagattacaagtcaaaatcatggatttgaagtagttaaagaaagcttgccaaaaaatgttgagatgactcataaatctttgtttgataattctgtagaaggaataaaattaaaaaataaacctgttttttctgttcaatatcacccagagtcaaatcctggacctcaagatagccattatttatttaatcaatttatcaacttagtaaaaaaaaatgccaaaaagaaaagatattaa

SEQ ID NO: 319422 - DNA, 1117 bp, Unknown
  Bacterial polypeptide expressing nucleotide sequence isolated from the Sargasso Sea
catgagtaaagaaaaggcaatacttgcattggcagacggaacaatcttcgaaggcataagtattggcgcttcaggacgggtaaatggtgaaattgttttcaacacttcaatgacaggttatcaagaaattcttacagacccttcatatgccaagcaaatagtaaccttaacttatccacatattggaaatacaggaacaaatagtgaggatactgaatcagataaaatttggtgttctggattagttataaggtcgctttctcaggccgaaagtagttggcgtaatgctgaaacattatcaaattatctaattagaaataatattcaaggaatatcagatatagacacaagaaaattgacaagaataataagagaaaaaggtgctcagtcagcatcaatatttactggtaactcagttgattcaaacaacgcaatagattttgcgaaagattttgaaggtttagctggattagatctcgcaaaagaagttacaacagaatctagttatgattggaaagaaggaacatggagaggaaatcatggtgaatctgattttagagttgcagttttagatttcggaattaaaaaaaatatattaagaatattagctgaccatgggtatgaattaaaaattttccccgcaaaaacttcgtaccaagaaattttagatttcaaaccaaatggtgtgtttttgtccaacggacctggcgatcctgaaccatgcatctatgccatcgagacaattaaagaattaatacaaatcagtatgccagtatttggtatttgtctaggtcatcaattactagcaatagcattgggtggtaagacatcaaaaatgaaatttggtcatcatggagcaaatcatcctgtccaagacctcaaaacaagaaaagtttcagtaagctctcagaatcatggcttcacagtcgaagaaaattccttacctgcagatgttgagataactcataaatccttatttgatggaactattcaaggaattcaacattcttctaaacccttttttagttttcaagggcatcctgaagccagccctggacctcatgatttggcttatctattctcaacatttgataaaaatatgagtataaatgcctag

SEQ ID NO: 319423 - DNA, 1123 bp, Unknown
  Bacterial polypeptide expressing nucleotide sequence isolated from the Sargasso Sea
atgtctttcaaagccatattagcatttgaagatggtagtgtattctatggaaagggttttggaaaagaaaaattcgatgtaggcgagcttgtttttaatacttccatgacaggatatcaagagatcattactgatccatcatataaaaagcaaattattacttttacacatccacatattgggaatacaggaataaaccaagaggataatgaatctaaagtaattcatgcctctgggatggttgttaaaaacttttgtgaaaagccaagtaattggagatcagaaacttcgcttgaagattttttagttaaaaatgatgttatggctatttcagaagttgatactcgccaaatcacatccatgttaagagaaaacggtgcaatgaattgttgcataggctctatatctgttatttctgaagagggtgcaatcaaagaagccaaatcatttaagggattaaaaggtatggatttagctcaagttgtttcttcggcttctgaatatgaatggaatgaaggaatttggcctgaaaataaaaaatctaatgaatctttaccagttgttgcatatgactacggtataaaagaaaacattttgaggcttttggctgaacatgttggtgaagtaaaagttgtaaatgctaaaaccacatatgaagaaattattaagttaaaacctaaagggatatttttatcaaatgggcctggcgatcctgagccttgtgattatgcaattagaaatattaaaaaatttttagaagcaaaaataccaatttttggtatttgtctaggccatcagctgttagctcttgctggaggagcaaatacttataaaatgaaatttggacatcatggggctaatcatccagttcaagatatttcatcaaaagaagtatttattactagtcaaaatcatggatttgcagttgatatcgattctctaccttcaaatatagaggcgacacatatatcattatttgataagtcacttcaaggtatacaattcaaggattcacctgcttttagtttccagggacatcctgaagcaagtcctggtcctcaagaaatacaaatcctttttaacaaatttagcttaatgattaaagaatatgccaagacgtaaa

SEQ ID NO: 319424 - DNA, 418 bp, Unknown
  Bacterial polypeptide expressing nucleotide sequence isolated from the Sargasso Sea
gatccaagcgctaccgggagaatatgcaattcctgtaatcaaaaaactaatcgactcaaatataccaatatttggtatttgtcttggacatcaattacttgcattatcattaggattaaaaacatataagatgcaccaaggtcaccatggcgcaaatcatccagtaaaaaataattatgattcaagtgtgagcataacatccatgaatcacggttttgccgtcagaagtgataatttaccagaagatattatagaaactcatactagtttatttgatggaagtaattgtggaattgaaatggttaataaaccgattttttcagttcaacatcatcctgaagcatcgcctggaccaaatgatagctattatttatttgataaatttttagaaaatattgagaaacataagaatgcctaa

SEQ ID NO: 319425 - DNA, 464 bp, Unknown
  Bacterial polypeptide expressing nucleotide sequence isolated from the Sargasso Sea
gatgattaatccatataagaaaaacgcgaaattagttttaagtaatggaattgtattcccaggattctattttggtgcttctggtactgctattggtgaaatagtttttaatacgggaatgacaggttatcaggaggttattactgatcctagttattatggacaaatattaacattcacttatccagagattggaaatactggtattaattttgaagattctgaatctaatatcaatattaagggtataatcgttagaaatttttcctctaatagtagcaattggagatctaaaaaaaattttaatcaatggttagttgagaaaaatatcataggtctatatggaattgatacaagggctctcgttaagattttaagatctgctggtgcgatgaatggagttattacctctatagataaaacagatgaaagttgtttaaagataattcaggatacgccaaaga

SEQ ID NO: 319426 - DNA, 902 bp, Unknown
  Bacterial polypeptide expressing nucleotide sequence isolated from the Sargasso Sea
attgaccacaaaacgaaaaaaaaataattcaattaaacctcaattttcttcagctattttagttcttgaaaacaaatcagtttatagaggaattggcttaggctaccaaggtgaagcgactggtgaaatttgtttcaacacttctttaactggctatcaggaaattatatctgatccttcttatgcggggcaaattataaattttacttttcctcatattggtaatgttggaacaaataatgaggatttagagtctgataaaatatgggcaagaggagttatttttaactctgaaataacaagtccttcaaattatagatctttaaaaaatttagatgaatggttaaagaaaaacaaaatagttgggataactggacttgatactagaagcctaacgaacttcataagggataaaggcgctcccaaaggcacaatatcgaataataaacagggtaattttaatataaaaaaattgattaatatctcaacaaaatggccaggtttaaatggcttagatttagcgaaagatgtaacgacaaaaaaagcatatacttggaaaggtttaaaaacttgggagaaaggtaaaggttttaaaaaaaataaaaagaaatctctaaggattgttgcaatagattatggcataaaaaaaaatattttaagatatttttccaattatgattgtgaggtaaaagtagtttcatgcaaacaaactgctgatgaaatattaaagttaaaaccaaatggaatttttttatcaaatggccctggggatccagcggctacaggaaaatatgcaattcaaacagtacaaaaattaattagctctaatttgccagtttttggaatttgtttagggcatcaaattcttgccttagcattaaatggaaagacaaaaaaaatga

SEQ ID NO: 319427 - DNA, 732 bp, Unknown
  Bacterial polypeptide expressing nucleotide sequence isolated from the Sargasso Sea
taagaaaaaaaggtgcaatgagaggaattatttcaacggaagattttgacactcataatttggccagcaaaattaaaaatattcctaaaatggaaggtcaagacttagcaattaaagttgccagaaagaaaaaagtggttttatcaaatactgataatcctatttataaaatcgcagcaattgattttggcatgaaaagcaatatatatgacattatgcttgaacacgatgcagaagttgaaatctttccagcaaatgtaacccacgatgaaatacttgcttctaatccagatggtgtgtttttatcgaatggacctggagaccctgctgctgtaacgtatggaatagaaacggtaaaaaatttgttgggtaaaaaacctatatttggaatatgtcttgggcatcaaattctagctttagcattaggtgctaatacgttcaaaatgaagtttggtcatagaggtattaatcagccagttaaaaacttaattacaaacaaagttgaaattacatcccaaaatcatggatttgctgttgacgaagattctcttccattaaatgtgagtgttacgcataaacatttaaatgatgataccgttgcagggataagctgcaaagatatttcagcatattcagttcaatatcatcctgaagccagtccagggccacatgattcaagatatgttttcaaagaattttttaatatgatgaagaacgatgccaaaacgtaat

SEQ ID NO: 319428 - DNA, 505 bp, Unknown
  Bacterial polypeptide expressing nucleotide sequence isolated from the Sargasso Sea
atagttccctgtaaaactagtgcaagaaatattttaaaattagaacctaatggtatcttttggtcaaatggccctggtgatcctgcggcgactggcaaatatgctattcccatcataaaagaatttataagaaataatcttccagtttttggaatttgcttaggccaccaactacttggattagctttgggggcaaaaacaaaaaaaatggatctgggccatagaggtgctaaccatcctgttaaaaatttgatcaaaggtaatgtagaaataaccagtcaaaaccacggatttgaaatagtgaagaaaagtttaccgagaaacattctagttacccatcaatctctttttgataatagtatagagggaattaaacttaaatctaagccagttttttctgttcaatatcatcctgaatctaatcctgggcctcaggatagtgtttatttattcgaagagtttgtaaaaagtatgaaaaaaaatgccaaaaagaaaagatattaaa

SEQ ID NO: 319429 - DNA, 407 bp, Unknown
  Bacterial polypeptide expressing nucleotide sequence isolated from the Sargasso Sea
atatgcaatcaaaattattcaaaatcttattaaaaagaaaatgccattatttggtatctgccttggtcatcagatacttgcacttgcattaggtggtaaaacaaaaaaaatgaaattaggtcacagaggagcaaatcatcctgtaaaaaatttgattaaagacaatgtagaaattactagccaaaatcatggctttgaagttgtaagagaaaatttaccaaaaaatattcaaattactcataagtctttgttcgataatagtatagagggaataagattgaagaataatcttgtattctcagttcaatatcacccagagtcaaacccaggaccacaagatagtgtctatttattccaagaatttattaacaatatgaaaaaaaatgccaaaaagaaaagatcttaaa

SEQ ID NO: 319430 - DNA, 325 bp, Unknown
  Bacterial polypeptide expressing nucleotide sequence isolated from the Sargasso Sea
atggttaagaaaatcaacttagttttagaagatggaactttttattcaggtttttcatttggatttcaaaaagatgtttatggagaagttgttttcaatacatcaatgacaggatatcaagaaatgttaaccgacccatcttataggggacaaatattaatacctacttacccattgattggtaattatggaataagttctaaagatgtggaatcttcaaatatacaagtcaaaggatttgttgttaggcagttttgtgaagaaccatcccataataattcaataatgaatttagatcaatatttggaaaataataaaataccag

SEQ ID NO: 319431 - DNA, 598 bp, Unknown
  Bacterial polypeptide expressing nucleotide sequence isolated from the Sargasso Sea
aataaaaagaaaaaatttagggttgtggcaatagattatggaattaaaaaaaatatacttagatatttctctgattttgactgtgaagttaaggtcgtttcctgcaaagaagatgccgataacataattaatctaaaacctcatggaatttttttatcgaacggtcctggtgatcctgcagcaacaggaaagtatgcgattgaagttgtaaaaaaattaattaaaaaaaatattccattatttgggatatgtttaggtcatcaaatattagctttagcattggatgcaaaaaccaaaaagatgaaattggggcacagaggtgcaaatcatccagttaaaaatttgattacaaagaaagttgaaattacaagtcaaaatcatggatttgaggttgttaaagaaagcttaagaaaaaatacagaaataacgcatctatcattattcgataattctatagaaggaataagattaaaaagtaaaccagttttttctgtccaatatcatccagaagctaatcctggaccgcaagatagtaaatatttatttagtaattttattaaagaaataaaaaaatatgccaaaaagaaaagacattaaa

SEQ ID NO: 319432 - DNA, 991 bp, Unknown
  Bacterial polypeptide expressing nucleotide sequence isolated from the Sargasso Sea
tccctcatacaaaaaacaaataattactttcacacatccacatattgggaaatacctggtgtaaatgaggaagataatgaatcaaaaactattcatgcctcaggaatggtagttaaaaacttttgtgacaaaccaagtaattggagatcaaaagccactttaggcgaatttttaataaaaaatgaagttatagggatagcagacgttgatacaagggaaataacaacaattttaagagaaaaaggagcaatgaattgttgtattgcatcgctttcagaaatttctgataaagaagctgttgcaaaagcaaaggcatttgaaggtctaaaaggaatggatttagcaaaagttgtctccacagataaagaatataaatggaatgagggagtttggcctgagaataataaatttaatgatgaatatcctgtagtagcttacgactatggcattaaagagaatatattaagacttttaagtgagcacgttggatctgtaaaagttgtaaatgccaaaactccattcgaagaaattattaaatataatccaaaaggtatatttttatctaatggtccgggagatcctgagccttgtgattatgctatagaaaacattaaaaaatttcttgaaaataagattccaatttttggtatctgtcttggtcatcaattattagctcttgctggtggggctaatacttacaaaatgaaatttggtcatcatggagcaaatcaccctgttcaagacatggcctccaaagatgtttttattactagccaaaatcatggcttcgcagtagatgaaaacactttacctaaaaatattaaagttactcatgtatctttatttgacaaatcacttcaaggcattgaatttatcgataggccggcatttagtttccaagggcatcctgaggcgagtcctggccctcaagagatacagatactttttgaaaaatttagttctatggtaaaagagtatgccaaaacgtaaa

SEQ ID NO: 319433 - DNA, 553 bp, Unknown
  Bacterial polypeptide expressing nucleotide sequence isolated from the Sargasso Sea
aattaaaaaaaatattttaagatatttttcaaattttaaatgtgatgttcttgtagttccatgtcaaacaagtgctgaacaaatactaaaactaaaacctgatggtatttttttatccaatggtccaggggacccagctgcaacaggaaagtatgcaataaaaattattcaaaatttaattaattctaatattccaatatttggtatatgtcttggccatcaattattggctttagcattaaaagcaaaaacaaaaaaaatgaaaataggacatagaggtgcaaatcatcctgttaaaaatttagtaaatgatagagttgaaataaccagtcaaaatcatgggtttgaagtagttaaagaaagcttgccgaaaaatgttgagatgactcataaatctttatttgataattctgtagaaggaataaaattaaaaaataaacctgttttttctgttcagtatcatccagagtcaaatcctggcccccaagatagtcattatttatttaatcaatttattaacttagtaaaaaatgccaaaaagaaaagatattaa

SEQ ID NO: 319434 - DNA, 1090 bp, Unknown
  Bacterial polypeptide expressing nucleotide sequence isolated from the Sargasso Sea
ctgatacttgaagatggcactaagttctctggtaagtctattggcattgagtctcattctgttggtgaagtcgttttcaatacagcaatgactggatatcaggaaatcattacagatccttcatatcataaacaaattgttaccctaacctatcctcacatcgggaatacaggaacaaatgacgaagacaatgaaagcaaagattctttctgttcaggtttggtcattcgagaaagctccccaatttcaagtaattggagaaataaactcagtcttgaagattttttatcaaagaatgagattgtaggaatatctaatatcgataccagaaaattgaccaatcatttgagaaatcatggctcaatgaatgcttgtttggcctctaatggtataagtactgaagaagcattgtctgaagcaaagtcattctcaggtttggccggattggaccttgctaaagaggtctcaacgaagaaaccatacattttttcatcatcagctgattcaacaaaccagcaatatcatgtcgttgcgatagattttggtgtaaagactaacattctcaatttgctttccaaaaatggatgcaaggtaactgtgttacccgctcaatcttcatttgatgaggtaatgagtcatgaccctgacggtgtctttttatcaaatggtcctggagatccagaaccatgtgattatgctataaaatgtatcagagaactgctcaaagtagatataccaatatttggaatatgtctcggtcaccaattattggcactcgcatcaggtgcgaaaacagaaaaaatgaaattcggtcaccatggtgcaaatcatcctgtgatagacactcagacaggcattgtttacatcacgagtcaaaatcacggttttactgtcaatgaaatgacaattccagagaatgttaaagtcacacataagtcattatttgatcaatccatccagggcattgaattgaaagataagaatgcgtttagtttccaaggccatcctgaggcaagcccaggacctcatgatattcaacccttatttcaaaaattcatctcgaatataaatcatgccaaaaagaactgac

SEQ ID NO: 319435 - DNA, 1117 bp, Unknown
  Bacterial polypeptide expressing nucleotide sequence isolated from the Sargasso Sea
atgagtaaagaaaaagcaatacttgcattagaagacggaacaatcttcgagggaataagtattggcgcttcaggacaggttaatggtgaaattgttttcaatacttctatgacaggttatcaagaaattcttacagatccttcatatgccaagcaaatagtaaccttaacttacccgcatattggaaatacaggaacaaatagtgaggatactgaatcagataaaatttggtgttctggattggtaataaggtcgctttctcaggcggaaagtagttggcgcaatactgaaactttatccaattacctcattagaaataatattcaaggaatatctgatatagacacaagaaaattgacaagaataataagagaaaaaggtgctcagtcagcatcaatatttactggtaactcagttgactcaaacaacgcagtagatttagcgaaagattttgaaggtttagctggtttagatctcgcaaaagaagttacaacagaatctagttatgattggaaagaaggaacatggagaggatgtaatggtgaatctgattttagagttgcagttttagatttcggaattaaaaaaaatatattaagaatattagttgatcaagggtatgaattaaaaattttccccgctaaaacttcttgccaagaaattttagatttcaaaccaaacggggtgtttttatctaacggacctggcgatcctgaaccatgtatctatgctattgagacaattaaagaattaatacaaatcagtatgcccatatttggtatttgtctcggtcatcaattactagcaatagcattgggtggcaaaacatcaaaaatgaaatttggtcatcatggtgcaaatcatcctgtcaaagatctcaaaactagtaaagtttcagttagctctcagaatcatggcttcacagtcgaagaaaattctttacctacaaatgttgagataactcataaatctttatttgatggaactatccaaggaatccagcattcatctaaaccttttttcagttttcaaggccatcctgaagctagccctggaccccacgatttggcatatctattcacaacatttgataaaaatatgactaaaaatgcctaga

SEQ ID NO: 319436 - DNA, 1129 bp, Unknown
  Bacterial polypeptide expressing nucleotide sequence isolated from the Sargasso Sea
aaaaaagatctctcaacaactcgacctaaacctattgaaggtcaacttattctagaagatggctcccgatataatggactaaaaattggctctcctaatatggaaataggagaagtttgttttaatacctcaatgacaggttatcaagaaataataactgacccttcttatgcaggacaaataatcaattttacttttcctcacattggtaatgtaggtacaaatcttgatgataacgaatctagtaaaccgtatgcgaaaggaatcataattaattgtgatatttctgatccatcaaactatagatccatccttcatcttgatgcgtggcttaaaaaaaataacgtaccaggtatttgtaatattgataccagactaattacaaatagaatccgttctaaaggtgcgccgaaaggtggcattatcgaaggtccaattaacaataaaaaaactgaatcctgtttaaaggaaataaaaaaatggaaagggcttaatggacttgatctggctatagatgtgtcacgcaaagatataaaaatttataaaactaaaaaaagttcaaaactaaaagtagtagcaatagattatggaattaagcaaaatatattaaattgcttattagatctaaatctagaggttattttagttccagctaaaacttccgtagataagattatttcttatagtcctaatggtatttttctttcgaacggtccaggtgatccgaaagcaacaggaaagtacgctattccaattataaaaaaactaatcaaatcagggatcccattatttggaatatgtcttggtcatcaacttatttctctagcattaggggcaaagacaaaaaaaatgtttcaaggtcacagaggggctaatcatcccgtaaaaaatcttgaaacagaaaaagtcgaaatcacatctcaaaatcatggttttgaggtaactgaaaaatctattccaaaagatgtaaaaataactcataaatcattattcgatggaagcgttgaaggtataagaaagggaagaaatatatttgcagttcaatatcatccagaagcaagccctggaccacacgatagtcattatctttttcaagaatttaaaaaaatgattaaacaaaatgcctaag

SEQ ID NO: 319437 - DNA, 1081 bp, Unknown
  Bacterial polypeptide expressing nucleotide sequence isolated from the Sargasso Sea
ttgatcaaaaaagcaaaaaaaactaactcaaaaataaaatcacaaatcaatacaggcattttagttcttgaaaataaaaaagtatttaagggaattggaattggataccaaggagaagctaccggtgaagtttgctttaatacatctttaacagggtatcaagaaatcatttctgatccttcgtatgcgggtcaaattattaactttacatttcctcatattggaaatgttggaactaataaagaagatcatgaatctgacaaaatatgggccagaggagtgattattaactctgaaataacttcaccctcaaattacagatcattcctacatttagattattggcttaaaaaaaataaaattgttggaattactggtttagatactagaaaccttacaaactttataagagataaaggtgcccccaaaggcacaattagtttttcaaaaaaaggaaagtttaatattaataaattgactaatgctactgtcaaatggagtggattaaaaaatcttgatcttgcagaagtagtttctacacataaaagttatatttggaaaggtcttaaaacctggaaaaaaggatttggatataagaaaaacaataaaaatttatttcatgttgttgcaattgattatggaataaaaaaaaatatcttaagatatttctctgactttaattgtaaagtcaccgtcgtttcttgtaaatataatgcacaaaaaattttagctttaaaaccaaatggaatatttttatcaaatggtcctggtgatccagccgcaacaggaaaatatgctatagaaattataaaggacctaattaaaaaaaatttaccaatatttggtatttgtttaggtcatcaaattttagctttagctttaggtggcaaaacaaaaaaaatgaagttaggacatagaggtgcaaaccatcctgttaaaaatttaatacatgacaaagttgaaattactagtcaaaatcatgggtttgtagtagttgaagaaactttaccaaaaaaaattgaaataactaataaatctctttttgataatactattgaaggaataaagcttaaaaataaac

SEQ ID NO: 319438 - DNA, 1014 bp, Unknown
  Bacterial polypeptide expressing nucleotide sequence isolated from the Sargasso Sea
attgaaagaaaaacacaaaaatagaattgcaattaaatcaatcttttcaccagccattttaattttagaaaataaaacaatttttaaaggtattgggctaggctaccgaggtgaagcaacgggagagatttgctttaatacttcactaactggttatcaagaaattatatcagacccatcttatgctggacaaataattaactttacttttcctcatattggtaatgttggaactaacaatgaagatatagagtcagacaaaatatggacaagaggtgtaatctttaattctgaagtaactgatccatcaaattacagatctctaaaacatttagatatttggctaaagaagaataaaatagtaggaattactggacttgatacaagaagtttaactaattttattagagacaaaggtgctcctaaaggaactatttcaaataataaaacaggtaaatttaatataaaaaaactaatcaaaagaacgataatctggcctggtttaaatggaatggatcttgccaaagaagtttcgacaaaaaaaacttatacttggaaaggtttaaagacttggaataaagaagagggttataaaaaaaataataaaaaaaaatataaagttattgcaatagattatggaataaagaaaaatattttgagatatttttctaactttgactgtgaagttaaagttgtatcttgtaaagaaagtgcagaaaatttaataaagtttaaaccgcacggaatatttttatctaatggtcctggagacccggcggctacaggaaaatatgcaattcctactgttcaaaaattaataaaatcaaatttaccagtatttggaatttgtttaggtcatcaaattcttgctcttgcattaaatgcaaaaactaaaaaaatgaaattaggacatagaggagccaatcatcctgttaaaaatttgttatcaaaaaaagttgaaatcacgagtcaaaatcatggttttgaagtaataaaagaaagtctgccaaaaaa

SEQ ID NO: 319439 - DNA, 1090 bp, Unknown
  Bacterial polypeptide expressing nucleotide sequence isolated from the Sargasso Sea
aatggataagcatcaaaaacagacaattttacttttagatgatggacgtgaattttatggaaattcatttggttatcatggagagacgacaggtgaagtttgttttaatactggtatgtctggctatcaagaaattcttactgatccgtcatattgtaaacaaatagttacaatgacttcgccacacattggtaattatggcgtcaacaaagaagacattgaatcagataatattcaggtggccggttttgtaattaaagaagaatctgaaattccatcgaactggcgatcggaattatctattggaaaatatttagatcaacaaaaaatagttggaataaaagatattgatacaagggcattaacatgtcatatcagagataatggtgcaatgaatggaattatatcatcaattgacgatgatataaaatcactgaagttaaaacttgataaagttccatcaatgagtggattagatttggctaagttggttacaacaaaaaaatcttatgaatggtcaaatagtaaaggtttatataaagtagctgccatagactatggtatcaaactaaatattttaagattattagaagaccacaaatgcgatattactgtttttcctgctcaaacaactgctgatgaaataattgaatttgatcctgatggtatttttttgagtaatggacctggggatccaagtgccgttacatatggcattgaaatggttagatcattattaggtaaaaaaccaatttttggaatttgcctaggccatcagattctttcattagctcttggagcaaaaacatttaaacttaaatttggacacagaggaattaatcatccagtaagaaataatgatacaaagattattgaaattactagtcaaaatcatggatttgctgttgatttagattcacttccaaaaaatgttgtctcaacacatataaacttaaatgataatacttctgaaggtattatgtgcaaagagcattcagctttttcggtccaatatcatcctgaatcaagccctggccctcatgatagtagatatttatttaaccagtttactgatatgatgaaaaaataa

SEQ ID NO: 319440 - DNA, 619 bp, Unknown
  Bacterial polypeptide expressing nucleotide sequence isolated from the Sargasso Sea
gggtggtttcgaccaggaaccttatttctggccttcagaaacggagggtgttcccctgaaagtcgtggcatacgatttcggcatcaaacgtaacatactgcggttgatggcagcattgggaatcaacatcaccatcgtcccatgggacacgcctgctgaagtcgttcgacagatgaatccggatggtgtttttctctctaacggccccggtgatcctgccgcagtggaaagtgccattgaagaaatccgcagcctgcttggggtttttccgattttcgggatctgcctcgggcaccagatcctggctttggcgttaaactgcaaaacctacaaactcaaatgcggacatcatggagggaaccatcctgtaaaggattaccagaccaacaagattgagatcacaagccataatcatggattctctgtggacgaagacagtcttccggaagacgtcagagtgacccacaggaaccttaacgatcagacggttgaaggtctggaatcgcttcattactccgcttattccgttcaataccatccggaggccgcaccaggcccgcgggatgcccgttatctcttcaaacggtttgttgagatgatgggtaacaccaagcgttga

SEQ ID NO: 319441 - DNA, 1075 bp, Unknown
  Bacterial polypeptide expressing nucleotide sequence isolated from the Sargasso Sea
ttgatcaaaaaagcaaaaaaaactaactcaaaaaaatctcaaaatcacacaggcgttttagttcttgaaaacaagagagttttcaaaggtattggaattggataccaaggagaagcaaccggtgagatttgctttaacacctctctaacaggataccaagaaattatttctgatccttcttatgccggtcagattattaactttacattcccgcatattggaaatgttggaactaacaaagaagatgttgagtctgacaaaatctggacaagaggtgtgatctttaattcagaaataacctctccttcaaattatagagcatttttgcatttagattcctggcttaaaaaaaatagaattgttggaattacagggctagatactagatatttaacaagctttattagagataaaggagcgcccaagggaacaatttcttattcaaaaaatggaaaatttaatattagcaaattaacaaactcaaccattaaatggagtggattaaaaaatcttgatcttgcagaaactgtaacaacctcaaaaaactatatttggaaaggtcttaaaacttggaagaaagaaacaggatacaaaaaaaatacaaagaattcttttcatgtggttgcaattgattatgggattaaaaagaatattttaagatatttttcaaacttcaaatgcaaagtaacggtcgtttcttgcaaaacttctgctgaaaaaatattagatcttaaaccgcatggaatatttttatccaatggtcccggtgatcctgcagcaacaggaaaatatgcaatagaaatacttaataaattaattaaaaaaaatttacctatatttgggatttgtttaggtcatcaaattttagcattagctttagggggtaaaacaaaaaaaatgaagttgggacatagaggtgcaaaccatcctgtcaaaaatttagtgcatgataaagttgaaattaccagtcaaaatcatggttttgtagttgttgaagaaactttaccaaaaaaaattgaagtaactcataaatctctttttgataataccattgaaggaataagactaaaaacaa

SEQ ID NO: 319442 - DNA, 300 bp, Unknown
  Bacterial polypeptide expressing nucleotide sequence isolated from the Sargasso Sea
aaatgaaattaggacatagaggcgctaatcatccagttaaaaatttaatgtcaaaaaaagttgagattacaagtcaaaatcatggatttgaagttgttaaagaaagtttaccaaaaaatgttgagattactcatagatctctctttgataactgtatagaaggaattaaattaaaaaataaaccagttttttcagttcagtatcatccagagtcaaatcctggtccacaggatagtcactacctatttaatgattttattaaagaaataaaaaaatatgccaaaaagaaaagacattaaa

SEQ ID NO: 319443 - DNA, 1195 bp, Unknown
  Bacterial polypeptide expressing nucleotide sequence isolated from the Sargasso Sea
attgacgtcaaaacaaaaaaataaaaaatcagtaaactcaaaattatcccaagctgttttagttttagacaataaatctatttttaaaggtttaggcctaggctacaaaggtgtggcaactggcgaggtatgctttaatacctcaattactggatatcaagagattatttctgatccatcttacgctggacaaataattaacttcacttttccacatatagggaatgttggaacaaataaagaggacattgagtctgacaaaatttggacaagaggggtaatatttaattcagagattacaagtccgtctaattatagatcattaaaaaatttagatgagtggttaaggaaaaacaaaattgtaggaattactggattagatactagaaacctaactaattatataagagacaatggcgctcctaggggaacaatttcaaatactaaaacaggaaattttaatataaaaaaattaattaatacgtctttaaaatggcccggtttaaaaggattagatcttgcaaaagaagtaagtacaaaaaaaatttacaaatggaaaggtttaaaaacttgggtaaaaggtaaagggtttcagaaaacaaataaaaaaaattacaagattatcgcaattgattatggaataaaaaaaaatattcttagatatttttcaaactataactgcgaagttatagttgttccttgcaagcattcatctgatcaaatattaaatcttaaaccacaaggaatatttttatcaaatgggccaggtgatcctgctgcaacaggaaaatattctgtgaaaattatccaagaactaattaaaaaaaatttaccagtttttggaatttgcctaggacatcaattattggcgctagcattaaatgctaaaacaaaaaaaatgaaattaggacatcggggagccaatcatccagtaaaaaatttaattaataataaagtagaaattactagtcaaaaccatggctttgaagttattaaagaaagtcttccaaaaaatgttgagattacacataaatcactttttgataattctattgagggaataaaattaaaaaataaacctgtatattcagtccagtatcacccagagtcaaatccaggacctcaggatagtcactacttgtttaatgaatttattaaagatgtaaaaaaatatgccaaaaagaaaagatattaa

SEQ ID NO: 319444 - DNA, 1090 bp, Unknown
  Bacterial polypeptide expressing nucleotide sequence isolated from the Sargasso Sea
ctgatacttgaagatggcactacgttctctggtaagtctattggtattgattcctactccgttggtgaaatcgtattcaatacagcaatgaccggttaccaagaaattatcacagacccttcataccataaacaaatcgttaccttaacctatcctcatatagggaacactggcaccaatgaagaagacaatgaaagtaaagactcatttagttcaggcctagtcatccgtgaagtttcgccaatctctagcaactggagaaacaaactcagcttggaagattttttggttagaaataaaatagtcggaatttccaatatagacaccagaaaactcacaaatcatctgagaaacaatggatcaatgaatgcttgtttggcggctaatggattaagtcataaagaagcactaagtgaagcaaaatcttttccaggtcttgcaggtttggaccttgcaaaagaagtttcaacaaaaactgcttatgaattttctccaaacattgaaaattcagactctctttttcatgttgttgccatcgattatggcgtaaagacaaatattctcaatctgctatcgaaaaatgggtgcaaagtaaccgtaataccagcacaatcgtcatatgatgacgtaatgtcatatgatcctgatggagtgttcttatcaaacggtccaggagatccagagccttgtgattatgcgattaactgcatcagaaaattgctggaattaaatatcccactatttggaatttgtcttggtcatcaactgttagctctggcatcaggcgctaaaacagagaaaatgaaatttggacatcacggtgccaatcatcctgtaattgatatagaaacaggagttgtatacatcactagtcaaaatcatggctttactgtaaatgagaaatccattccagaaaatgtcaacattacgcataaatcactatttgatcaatccatccaaggcatagaacttagtgataagaatgcgtttagtttccagggccatcctgaagcatctcctggccctcatgacatacagccattatttaaaaaatttattacaaagatgaagaatggcaagaagaactgac

SEQ ID NO: 319445 - DNA, 364 bp, Unknown
  Bacterial polypeptide expressing nucleotide sequence isolated from the Sargasso Sea
accattatttggtatttgtcttggacatcaaatacttgctctaacattaggtggtaaaacaaaaaaaatgaaactaggtcacagaggtgcaaaccatcctgttaaaaatttaattcatggcaatgtagaaattactagtcaaaatcatggttttgaagttgtcaaagaaaatttacctaaaaatattgaggtcactcataaatcactattcgataacagtatagagggtattaaactaaaaaataaaccagtgttttctgtacaataccatccagagtcaaatcctggaccacaagatagcgtttatttatttcaagaatttattaataacatgaaaaaaaatgccaaaacgaaaagatcttaa

SEQ ID NO: 319446 - DNA, 439 bp, Unknown
  Bacterial polypeptide expressing nucleotide sequence isolated from the Sargasso Sea
gatgactaatccatataagaaaaacgcgaaattagtcttaagtaatggaattgtatttccaggattcttttttggtgcttctggtacagctattggtgaaatagtttttaatacgggaatgaccggatatcaggaagttattactgatccaagttattatggacaaatattaacattcacttatccagagattggaaatactggtattaattttgaagattcagaatctaatattaatgttaaaggtataattgttagaaatttttcatctaatagcagcaattggagatctaaaaagaattttaatcaatggttagttgagaaaaatatcataggtctatatggaattgatacaagggcgctcgttaaaattttaagatctagtggcgcgatgaatggagttattacatctctacataaaactgatgaaagttgttaa

SEQ ID NO: 319447 - DNA, 377 bp, Unknown
  Bacterial polypeptide expressing nucleotide sequence isolated from the Sargasso Sea
actgatacttgaagatggcactacgttctctggtaagtctattggcattgattcctactccgttggtgaaattgtattcaatacagcaatgaccggttaccaagaaatcatcacagacccttcataccataaacaaatcgttactttaacctatcctcacataggaaacactggcaccaatgatgaagacaatgaaagcaaagactcatttagttcaggcctagtcatccgtgaaagttcgccaatctctagcaactggagaaacaaactcagcttggaagattttttggttaaaaataaaatcgtcggaatttccaatatagacaccagaaaactcacaaatcatctaagaaacaatggatcaatgaatgcctgtt

SEQ ID NO: 319448 - DNA, 727 bp, Unknown
  Bacterial polypeptide expressing nucleotide sequence isolated from the Sargasso Sea
aaaattaactaatagctctattaaatggcatggattaaatgacctggatttagcaaaaacagttacaaccaaaaaacaatatatatggaaaggtttcaaaacatggaaaaaagagaaaggttttgaaaaaaataaaaagaagaaatacaaaattgttgcaatcgattatggaattaaaaaaaatattttaagatatttttctaattttaattgtgaagtaattgtagttccttgttgtcttgaagctgaagatattattaaattaaaacctgatggtatttttttatcaaatggtcctggggatcctgctgcaacaggaaaatatgcaatagatataattcaaaaattaattaaaacaagtattccaatatttggaatatgtcttggacatcaattgttagctttagcacttaaagcaaaaacaaaaaaaatgaaattaggtcatagaggcgcaaatcaccctgtaaaaaatttaattaataataaagttgagataacaagtcaaaatcatggatttgaagtagttaaagaaagcttaccaaaaaatgttgaaatgactcataaatctttatttgataattccgtagaaggaataaaattaaaaaataaacctgttttttctgttcaatatcacccagaatcaaatcctggccctcaagatagtcattatttatttaatcaatttattaacgaagtaaaaaaaaatgccaaaaagaaaagatattaa

SEQ ID NO: 319449 - DNA, 253 bp, Unknown
  Bacterial polypeptide expressing nucleotide sequence isolated from the Sargasso Sea
cggccgcgtggtcatcacgtcgcagaaccacggtttcgcggtcgacgccgacacgttgccggccaacgccaaggtcacgcacatttcgctgttcgacggcacgctgcaaggctttgcattgaccgacaagccggcgttctgcttccagggtcacccggaagcgtcgccgggtccgcacgacatcgcgtatctgttcgaccgcttcactgggttgatggacgcgcagaaggccggcaacactgcagcggcataa

SEQ ID NO: 319450 - DNA, 1051 bp, Unknown
  Bacterial polypeptide expressing nucleotide sequence isolated from the Sargasso Sea
gttgaaaaaagatcactcaacaactcgacctaaacctattgaaggtcaacttattctagaagatggctcccgatttaatggactaaaaattggctctcctaatatggaaataggagaagtttgttttaatacctcaatgacaggttatcaagaaattataactgacccttcttatgcaggacaaataatcaattttacgtttcctcacattggtaatgtaggtacaaatcttgatgacaacgagtcaagtaaaccgtatgcgaaaggaattataattaactgcgatatttctgatccatcaaactatagatctatccttcatcttgacgcgtggctcaaaaaaaacaacgtaccaggtatttgtaatattgataccagactaattacaaatagaatccgatctaaaggtgcgccgaaaggtggcattatcgaaggtccaataaacaatagaaaaactgtatcctgtttaaaggaaataaaaaaatggaaaggacttaatggacttgatctagctatcgatgtgtcacgcaaagatataaaaatttataaatctaaaaaaaattcaaaactcaaagttgtagcaatagattatggcattaagaaaaatatattaaactgcttattagatttaaatttagaggttattttagttccagctaaaacctctgtagagaaaatactttcttatagtcctaatggtatttttctttcaaacggtccaggtgatccgaaagcaacaggaaaatacgccattccaattataaaaaaacttatcagatcaaggattccattatttggaatatgtcttggtcatcaacttatttctttagcattaggtgcaaagacaaaaaaaatgtttcaaggtcacagaggggccaatcatccagttaaaaatcttgaaacggaaaaagtagagatcacatctcaaaaccatggttttgaagtaactgaaaaatctattccaaaagatgtaaaaataactcataagtcattattcgatggaagtgttgagggtataagaaaaggaaaaaatatatttgcggttcaatat

SEQ ID NO: 319451 - DNA, 673 bp, Unknown
  Bacterial polypeptide expressing nucleotide sequence isolated from the Sargasso Sea
aaatcttgatctagcttctatagttagtacctctaaatcatacaaatcctcagaaggaatttgggatataaataaagatgaatatatagataataaaaatagtcagtttaaaatagcttgtttagattttggtataaaaaaaaatattctacgtaatttaaacaataattttttttcaccttatgtactaccagcaaattcttctttagatgaaattttaaaaataaatccaaaaggaatatttctttcaaatggaccaggtgatccgtatgcaacaggaaaaaaaattattccaacaattaaagaaatcatcaacaaaaaaattcctatttttggtatttgtttaggacatcaaatattaaatttagcattaggaggtagtactaaaaaaatgtttcaaggacatagaggtggcaatcatcctgtgaaaaatcttgagaactcaacagtagaaattacatcccaaaatcatggttttgaagttgatagaaatactctacctaacaatgttattgaaacacatatttcattatttgatggaacaaatgaaggtattaaacacaaaaatttaccaatatttagtgttcaatatcatcctgaagctagtccaggacctcatgatagccattatttatttaagaaattttatgatcaagtaaaagaatatgcctaa

SEQ ID NO: 319452 - DNA, 582 bp, Unknown
  Bacterial polypeptide expressing nucleotide sequence isolated from the Sargasso Sea
tacacgttgttgctattgactatggaataaaaaaaaatattttgagatatttttccgactttaattgtaaagttacaatagtttcctgtaaaacagactcaaatgaaattctgaaattaaaacctaatggtgtttttttatcaaatggtcctggtgatccagcagcgactggaaaatacgctattccaattattaaaaaattaataaaaagtaatcttcctgtatttggaatttgtttgggccaccaattactaggattagcactaggagcaaaaactaaaaaaatgagtttaggtcatagaggtgctaatcatccagtgaaaaatttgatcaaaggaaatgtagaaataacaagtcaaaatcatggattcgaaatagtaaaaaaaaatttaccaaaaaatatacaagttactcatcaatctcttttcgataatagcatagaaggaattaagcttaaatctaagccggtgttctcggttcaataccatcctgagtctaatccaggaccgcaagatagtgtttatttatttgaagagtttgtaaaatgtatgaaaaaaaatgccaaaaagaaaagatattaaa

SEQ ID NO: 319453 - DNA, 1060 bp, Unknown
  Bacterial polypeptide expressing nucleotide sequence isolated from the Sargasso Sea
aatgaagtttgatgtaaaactactacttgagaatggaatttcattcgagggtattggttttggataccaaaaaataggtgttggagaagttgtttttaacaccgccatcacaggctaccaagaaatacttaccgacccatcttatgatggccaaataatcactttcacttatcctcatatcggtaatacaggaattaattttgaagacaatgagtctaagcaagtttctgcaagaggaatgattgttaaaaacttttgtgattttccaagtaattggagatcaaaacaaagtctcgaagaatttttaatagaacaaaaagttatttgtatatcagatatagatacaaggcagctaacaaaaattttacgtgatgagggctgcaaggttggtgcaatctatccaacaaaaaattttactgacgaggaagctcaatttgaaatagataattttgggaatattgaagataaagatttcactgaaaatgtttcggttaaagagccttataacttcggcaaacctaagaataaaaagactttcaaaattgttgctattgattttggaattaaagagaacattttaaggatattgcaaagaatgggtggagatattgaagtggtgccaccgagcattagcgcagaagagatacaaaaaaagaatccagatggaatttttctttccaatggtcctggagatcctcaagtcttagctgaacctataaaggaagttaagaaaatgatgcagcttgatattcctatatttggtatttgtttaggtcaccagattatgtctttggcatatggtctagaaatagaaaaaatgccttttgggcaccatggtgcaaaccatcctgttcacgacttaaaaaataatatagttttcattacttcacagaaccataactttgctgttgctgaaccaaacaatagagatgatatcaatattactcatagatctttatttgataactctattcaaggcatagagcataaagagaaaccattctactcgattcaatgtcaccctgaagctagtcctggtccaaaagaattcgaaacttta

SEQ ID NO: 319454 - DNA, 894 bp, Unknown
  Bacterial polypeptide expressing nucleotide sequence isolated from the Sargasso Sea
gatgcccctcccttcatcacgtcaggctcatctcgtgctggccgacggcaccgttctcaccggagaagccttcgggcatcgcggctccgttgtgggtgaggtggtcttcaacaccggcatgactgggtaccaggaggtcctcactgacccgtcctacgcagggcagctggtcacgttcacttatcccgagctgggcaacaccggtgtgaacggggatgaccaggaggcagacctgccccatgccaggggggtgattgcgcgccagctggccccgcaagccagcaactggcgcagtgctgaatccctcgacggctggatggatcgccatggactggtgggcatctgcggtgttgacacccgcgccctggtgcgtcgtcttcgcgatggcggagccatcaatggtgtgatcagcagtgatggacgttcgcccgctgagctgctggccgaggtccgtcgtgccccgagcatggagggcctcaatctggccagccaggtcagcaccccagagccctatcaatggtcgtcgccttgccgcgtcggctttgatcagcgcttgaaacagcgccccgaccatccctaccgggtggttgccatcgatttcggcatcaagcgggcgatcctggatcggcttgtcgcccatggctgtgccgtcactgttctgccatcggatgcagatctggagatggtgctgtcccatcagccggagggcgtttttctctccaatggcccaggtgaccccgccgcggtggacagtggcatcgacctggcacgatcgctgctggatctacccaacctgcctctctttggcatctgtctgggccatcagatcctgggcctggccctgggagggcgcaccttcaagctcggctacggccaccgtggtctgaaccatcc

SEQ ID NO: 319455 - DNA, 1141 bp, Unknown
  Bacterial polypeptide expressing nucleotide sequence isolated from the Sargasso Sea
gatgattaatccatataagaaaaacgctaaattagttttaagtaatggaattgttttcccgggtttcttttttggtgcttctggtacagccattggtgaaattgtttttaatacgggaatgacaggatatcaagaagttattactgatccaagttattatggacagttattaacttttacttatccagagattggaaatactggtattaattttgaagattcagaatctaatattaatgttaaaggtataattgttagaaatttttcatcgaatagcagcaattggagatcacaaaagaattttaatcaatggttagttgagaaaaatatcataggtctacatggaattgatacaagagctcttgttaaaattttaaggtctaatggcgcgatgaatggagttattacctctctagataaaactgatgaaagttgtttaaagataatttctgatactccaaagatggagggattaaatttatcaaaagttgtttcaacaaagcaacaatatttatggaaaagtcatacgcaaacaatttttgatctaagaaaaagatatgacgaatcttctaaaaagttaaaaatagtagcaattgattttggaattaaaaattcaattctaaatagacttgtatcccatggttgtgaagttttggttttaccttctcgatcttctctaaatgatgttctgtctaacaagccggatggtgtatttttctcaaatggtcccggcgatccttcatctgtttctgaaggtatagacttagcaaaatctctcattgaatatggtgagatacctatgtttggtatttgccttggccatcaaatatttggattagcattaggaggttcaacttataaattaccttttggacatcgtggtttaaatcatccttgtggtgaaaataataaaattgaaataactagtcagaatcatggttttgctattgatcccaattctctctcaaaggacatagttagaattacccactataaccttaacgataatactgtggctggcctagaggtttataataagcctatatttagtgtgcaatatcatccagaagcaggacctggcccacatgattcagattatttatttgaaaaatttgtttctctaatgttagaaagatgttga

SEQ ID NO: 319456 - DNA, 1198 bp, Unknown
  Bacterial polypeptide expressing nucleotide sequence isolated from the Sargasso Sea
tttgagacaggtcaaaaacagaaaaaacaaatctcacaatttttcgacaggtattttaatttttgaagatggcaccaaattttttggaacaggcattggttacgagggtaatgctgttggggaagtttgtttcaacacatccattactggttaccaagaaataataacagatccctcttattctgatcaaattataaatttcacatttcctcacattggtaatgttggaacaaatcttgaggataacgaggctgataaggtctgggcaaaaggggttatcctcaattctaatgttacagaaccatctaattatagatcgattaaaaaactagataggtggcttaaaaaaagaaaggtcatcggtatagtaggtttagatactagagttataacaaattacattagagacaaaggtgctcccaaaggatcaatacagtttttaagaaaaggaaatcataatttaaaaaaacttttaaaaaatgcaagatcgtggaatggattattaggcttagacttagctaagaaagttacttgtaaaaaaatttataaatggaagtctttgaagtcttggaataagaaaaatggttacgttaaaaataataaaaataaatatcaaattatcgcaattgattatggaatgaaaaaaaatcaattaagatgtttttcagatattaattgtggtgtgacagttgttccagcaaattttccagcagatgagattttaaaacttaaaccacatggtgtttttttatcaaacggtccaggagatcctgcggcaacaggaagttatgcaataccgattgtaaaaaaattaattgaaaagaaaatacctatttttggtatctgtctaggtcatcaaattttgtcattagctcttggggcaaaaactaaaaaaatgtcacgaggacacagaggagcaaaccatccagtaaaagatttaacaaccaataaagtcgagataactagtcaaaatcatggttttgaagttgatagtaaatctattcctaaaaatgtaaaagtcactcacaaatctctttttgatggttctattgaaggtatagaggtaaaaaataaaaaattattttcagttcagtatcatccagaagctaatcccggaccacaagatagtaaatatttattcgaaaaatttttgaaaaacataaaatcaaataaaaatgggaaaaagaaaagatattaa

SEQ ID NO: 319457 - DNA, 907 bp, Unknown
  Bacterial polypeptide expressing nucleotide sequence isolated from the Sargasso Sea
attgaacaaaaaagcaaaaaaaattaactcaaatacaaaatcacaaatcaatacaggcgttttagttcttgaaaataaaaaggtattcaaaggaattggaattggttaccaaggagaggctacaggcgaagtttgctttaatacatcattaacaggctaccaagaaatcatctctgatccgtcatatgcggggcagattatcaactttacctttcctcatataggaaatgttgggaccaataaagaggatcatgagtctgataaaatatgggcaaaaggagtaataatcaactcagaaataaccacgccctcaaactacagatcttttctacatttagactcttggctaaagaaaaataaaattgttggaattactggcttagacaccagaagcttaacaagctttataagagacaaaggcgcccccaaaggtactattagttattcaaaaaaaggaaaatttaatattaataaattgaccaactctacaataaaatggagtggattaaaaaatcttgatcttgcagaagtagtttcaactcagaaaaattatatttggaaaggtcttaaaacatggaaaaaagaacttggatataaaaaaaataataaaaactcatttcatgttgttgcaatcgattatggaataaaaaaaaatatcttaagatatttctccgagtttaattgtaaagttacagttgtctcctgtaaaactagtgcccacaaaattttagctttaaaaccaagtggaatattcttgtcaaatggtcctggtgatccagctgcaacagggaaatatgctatagaaattattaatgatctaattaaaaataatttacctatatttggtatttgtttaggtcatcagattttagcattagctttaggtggcaaaacaaaaaaaagaaat

SEQ ID NO: 319458 - DNA, 401 bp, Unknown
  Bacterial polypeptide expressing nucleotide sequence isolated from the Sargasso Sea
ctattccaattataaaaagttttataaaactcaaccttctttatttggaatttgcctaggtcatcaattactaggtttagctttaggtgcgaagactaaaaagatgagtttagggcatagaggtgccaatcatcccgtcaaaaatttaattagaggaaacgttgaaataactagccaaaatcatggatttgagatagtaaaaaaaaatttaccgaaaaatatacaaattacccatcagtctctttttgataaaagtatagagggaattaaacttaaatctaaaccgattttttctgtacaataccatcctgagtcaaatccagggccacaagatagtgtttatttatttgatgagtttattaaaagtatgaaaaaaaatgccaaaaagaaaagatattaaa

SEQ ID NO: 319459 - DNA, 304 bp, Unknown
  Bacterial polypeptide expressing nucleotide sequence isolated from the Sargasso Sea
atgcaaaaagcgtatttaatattagaagatggctcaatttttgaaggtaatagtattggtttctcaagtacaaaatatggagaagttgtatttaatacaagtatgactggttatcaagaaattttgactgatccttcctactcaggtcagattgtagtagctacttatcctttgattggaaattatggaatcaatagtagtgattcacaatctaaacagatacaagttaaaggttatgttattagggaatattgtgaatttccaagtcattatgactccgaattagatttagacacttatctta

SEQ ID NO: 319460 - DNA, 490 bp, Unknown
  Bacterial polypeptide expressing nucleotide sequence isolated from the Sargasso Sea
tatgattaatccctataagaaaaatgcaaaattagttttaagtaatggaattatattccctggattttcttttggcgcttcaggtactgctgttggcgaaatagtctttaatactggaatgactggatatcaggaggtaattactgatccaagttactatggacaaatattaacatttacttatccagaaattggaaatactggtattaaccttgaggattcagaatctattaatagtgttaaaggaataatagttagaaactattcatcaaataatagtaattggagatctctaaataattttgatcaatggttagttgagaaaaatatcataggtctctatggaattgatacaagggctctagttaaaatcttaagatctaatggctctatgaatggagttcttacttctgaagatattcctttagaaagttgtttaaagataatagaggaaacgccaaaaatggagggattaaatttatcaaaatta

SEQ ID NO: 319461 - DNA, 1117 bp, Unknown
  Bacterial polypeptide expressing nucleotide sequence isolated from the Sargasso Sea
tatgtctaatctaaaggcaatattagcattagaagatggaactatatttgaaggtagaagtataggggcctcaggaaagactaatggtgaaatagtcttcaatacttccatgacgggttatcaagaaatccttacggatccttcgtacgctaaacaaattgttactttaacttaccctcacattggtaatacagggattaatcatgaagatgttgaatccgatgccgtatggtgtgctggattggtaatacgttctaattctttcttgcaaagtagctggagaagtgaaaattctttaacagattatttaaaagctaatagtattttgggcatatctgacatagatactaggaagctaactagattaataaggacaaaaggagctcaagcagcttcaattttagtatctgaagatatcaataaagatgaagctattgatgaagctagaaaatttaaaggattggctgggatggatttagctcaagaggtaactactcctgaaagttatacatgggacaaaggagtttggagacaaccaattcaagactctcaattaaaggttgttgcacttgattttggtattaaacagaacattctaaggatactagctagcagaggttttgatttaaagattgtgcctgctaaaactactgctgatgaaatattgaaattaaaaccaaacggagtatttctatctaatggacctggggatcctgagccatgtgattatgcaatacaaactatcaaagagcttgctttaagagagattcctttattcggcatttgtttaggtcatcaactcctagcactttcttttggcggtaaaacttctaagatgaaatttggtcatcatggagcaaatcatccagtacaagaccttaaaacaatgaaagttgctgtaacgtctcagaatcatggctttactgttgaggaagattctttaccaagtgaattaaaaataacacataaatctttatttgatggaactgttcaaggaatagaacataaaacgcttcctgcatttagttttcaaggacatccagaagctagccctggccctcatgatttaaagaatttatttcaaaaatttgaagataatatgaaaaataatgcctaa

SEQ ID NO: 319462 - DNA, 1114 bp, Unknown
  Bacterial polypeptide expressing nucleotide sequence isolated from the Sargasso Sea
cttgttagaagacggtagcacctttagcggccattctattggttctaatggtgtatctgttggagaagtagtttttaatacatctatgactggctaccaagaaataatcaccgatccatcttataataagcaaataattacttttacaaatcctcatattggaaatactgggactaataatgatgatttagaatccagacaagcatatgcttctggaattattatcagagatgaagagatattatctaataactggagacagactggcaacctgaaagattttctaaaaaaacaaaatattataggtatttctggtattgacaccaggaagctcactaagattttaagaacaaagggttctcaaaacggatgtatagtaacaggtaagtattctttggatgatgctaagcaaaaactttgtgaatttcagggactcgaaggtacagatttagcaattcaggtaacaacaaaaaaagaatatgattgggacaaaagatcaattgatatataccgtaatacaaattcaaaaaatagcgatataaaatatgatgtcatagcttatgactatggtattaaacataacatactcagaatcttatctgataaaagttgtaaaattaaagttgtgccagcagattatcctgttaaaaaagttttagagtcaaaaccagatggagtttttttgtcaaatgggccaggcgatcctaaagcatgtatttatgcaattaaaaatataaaagaaattttaaaacataaaattcctatgttcggaatctgtttaggatttcaattattagcccttgcttctgatgcatcaacaactaaaatgaagtttggtcatcatggtgcaaaccatcctgtgatggatctttcaactaagaaagtatttataacaagtcagaatcatgggttcatggttgatgatgaaaatctccctgagaatataattaaaacacatgtatcactttttgatggttcattacaagggtttgagattaaggactctctcgcctttgggtttcaggggcatccggaagctagtccaggtccaaatgatataaaagaaatttttggaaagttcatagaaatgatggataggagaaaaaatgcctaa

SEQ ID NO: 319463 - DNA, 235 bp, Unknown
  Bacterial polypeptide expressing nucleotide sequence isolated from the Sargasso Sea
tatgaaaaaaaatagcgcaatactattactagatgacggaagaaagtttattggaaaatcttttggttttattggagaaacgattggagaagtgtgctttaacacgggaatgacaggttatcaagaaattctcaccgacccctcttattgtaagcaaattgtaacaatgacatcaccacatatcggtaattatggaattaatgaggaagatgttgaatcaaaaaaaattcaggtt

SEQ ID NO: 319464 - DNA, 797 bp, Unknown
  Bacterial polypeptide expressing nucleotide sequence isolated from the Sargasso Sea
gttatttaaaaagagaaaaaattgttgggattcaaatatagacacacgtgcccttactcgtcatatccgcgattgtggggccatgaatgggattatctcttcgatcgagaaagacgtcaatatcttaaaaagaaagctagacttagtaccctccatgaatgggcaagatttagtcaaagaggttacatgcaatgagccatatacatgggctaataaaagtgaaggctcttttagagtagcagcaattgactatggaattaagcacaacatcttgagattattaactgaaagagattgtactattaatgtgtttcctgcaaatatatctcctgaagaaataatggaaacagatccggatggaatctttctttcaaacggccctggagacccctcagcagtttcatatggaattgaaacagtaaaagctttgcttggtaaaaaaccaatatttgggatatgtctcggacaccagattttggcacttgcattaggagcaacaacttctaaactgaaatttgggcatcgtgggatcaaccacccagttaaaaggattgcaactggttcagtagaaataacaagccagaatcatggttttgtagttggtcttgaatctcttcctaaaaacgtagtaccaactcatgtgaacctcaacgacaatacctcagcagggatatcttgcgatgagttatctgcattttctgttcagtatcatccagagtcaagtcctggaccacatgatagtcgatatctttttaatcactttatagacttaatgaaaaatgccaaagagaaatgat

SEQ ID NO: 319465 - DNA, 1306 bp, Unknown
  Bacterial polypeptide expressing nucleotide sequence isolated from the Sargasso Sea
ctgccgggcgatgccgcgaagcctcgtgcgccacgcgccgggttcgcgtctcgacaacgcaggccgcgtccagcaagcgaccgcgcgcgcccacgcagcgcggcgcttgcgcggcagggtaagcaggtcggcagcagggtgttccccaaggagcctcccgtgttgccgtcttttactcccgccttgcttgcactcgccgacggcacggtctttcgtggttattcgatcggggccgaaggccacacgatcggcgaagtcgtgttcaataccgcgatcaccggctatcaggaaatcctgactgacccgagctactcgcgccagatcgtcacgctcacctatccgcatatcggcaacgtcggcgtcaacgccgaagacgtcgaagccacgaaagtccatgccgccggcctgatcatccgtgatctgccctcgctcgcgtcgaacttccgcatggaccgcacgctcggcgactacctgcgcgacgaaggcgtcgtcgcgatcgccggcatcgacacccgcaagctgacccgcatcctgcgcgacaagggcgcgcagaacggctgcatcctgacgggctcggacgacgaagcgaaggcaatcgagctcgcgcgctcgttcccgggtctcgccggcatggatctcgcgaaggtcgtgtcgaccacgaagccgttcgagtggaagcagaccgaatggcgcctcgaaggcggctacggcatgcaggaagcgccgaagtaccgcgtcgtcgcgtacgatttcggcgtcaagtacaacatcctgcgcatgctcgcggagcgcggctgccacgtgacggtgctgccggcgcaggcgagcgcggaagatgcgctcgcgctgaatccggacggcgtgttcctgtcgaacggccccggcgatccggaaccgtgcgactacgcgatcgcggccacgaagcagttcatcgagcgcggcgtgccgaccttcggcatctgcctgggtcaccagatcatgggcctcgcggtcggcgcgaagacgctgaagatgaagacgggccaccacggcgcgaaccacccggtgaaggatctcggcgacggtcgcgtggtgatcacgtcgcagaaccacggcttcgcggtcgatgcggattcgctgccggccaacgcgcgcgtgacgcacgtgtcgctgttcgacggcacgctgcagggcttcgagctgaccgacaagccggcattctgcttccagggccacccggaagcgtcgcccggcccgcacgacatcggctacctgttcgaccgtttcaccgcgctgatggacgcggcgaagcggcgcaacgcctgac

SEQ ID NO: 319466 - DNA, 250 bp, Unknown
  Bacterial polypeptide expressing nucleotide sequence isolated from the Sargasso Sea
agttaaaaatctaattaataatactgttgagataacatcacaaaatcatggttttgaagtggatagagcaagcttgccaaatgaagttgaagaaacacatgtatctttatttgatggatcaaatgaaggtatcaggcataaaactctgccggtatttagtgtgcaatatcatccagaggcaagtcctggacctcatgatagtaattatctttttagagaattttacaaattaattaagttgcatgcctaa

SEQ ID NO: 319467 - DNA, 859 bp, Unknown
  Bacterial polypeptide expressing nucleotide sequence isolated from the Sargasso Sea
taattgtgatatttccgatccttctaacttcagatctattcagcatttagataaatggcttaaaaaaaaaggtattcctggattatgcaatatagatacaagatcaattaccaatagaataagatctaagggagctccaaaaggaggaattgttaaaaaacttataaataaacgtcatgaaaaaaaatttctctcagaagtaaaaaaatggcagggacttaacaatcttgatcttgcaatagaagtaacacgtaaaaaaattcagaaatttaaaagtaaatcaaagtcaaaattaaacatagtagcaatcgattatggcatgaagcaaaatatcttaaattgcctgcttgaattaaatataaatgtaattgttgttcctgcaaatactacatcggatgaaatattagaatataatcctaatgggatttttttatcaaatggtcctggtgatccaaaagctacgggtaaatatgctatacaaaccataaaagatttaattcatcaaaagattcccatctttgggatctgtttagggcatcaattaatatctctcgcgcttggcgctaagacaaaaaaaatgtttcaaggccatcgaggagctaatcaccctgttcaaaatttagaaaacaaaaaggtagagataacatctcaaaaccatggttttgtagttactgaaaagtctatccctaaagatgttaagattacgcataaatctttatttgatggcagtgttgagggtatagagcataaaaataaagagatttttgcagttcaataccatccagaagcaagccctggacctcatgacagccagtatctttttcaaaaatttaaaaggatgattaatataaatgcctaa

SEQ ID NO: 319468 - DNA, 319 bp, Unknown
  Bacterial polypeptide expressing nucleotide sequence isolated from the Sargasso Sea
attgggtggtaaaacaaaaaaaatgaaattaggtcacagaggagcaaatcatccagttaaaaatttaattagtgaaaatgtggaaatcactagccaaaatcatggttttgaagttgtaaaagaaagcttaccaaaaaatattcagattactcataaatcgttgttcgataatagtatcgagggaataagattaaagaataatcctgtattctcagttcaatatcacccagagtcaaatccgggaccacaagatagtgtttatttattccaagaatttattaccaatatgaaaaaaaatgccaaaaagaaaagatcttaa

SEQ ID NO: 319469 - DNA, 1198 bp, Unknown
  Bacterial polypeptide expressing nucleotide sequence isolated from the Sargasso Sea
tttgagacaggtcagaaacaaaaaaaacaaatcacaaaatttttcaacaggtattttagtttttgaagatggcaccaaattttttggaaccggtattggtcatgaaggaagtgcagttggtgaggtttgtttcaatacctcgataactggttatcaagaaatcataacagatccatcttactccgatcagattataaattttacatttccccatatagggaatgtaggaacaaatattgaagataacgaggctgataaaacctggacaaaaggagttattctgaattctaatataactgatccatctaattataggtcaattaaaaaattagataaatggcttaaaaagagaaagattattggaattgtaggattagatactagagttattacaaactatataagagataaaggtgctcctaagggagcaatacaatttttgagaaaaggaaatcataatttaaaaaaacttttaaaaattacaaaatcgtggaatggattattaggcctagacttagccaagaaagttacatgtaaaaacatttataaatggaaatctttaaaatcttgggacaaaaaaaatggttatgtgaaaaataaaaaaaatatatatcaaattatcgcaattgattatggaatgaaaaaaaatcaattaagatgtttttctgatattaattgcggtgtaacagttgtcccagcaaactttccagcagataagattttaaaacttaagcctcatggggtttttttatcaaatggtccaggagaccctgcagcaactggaaggtatgcaataccaatagtaaaaaagttaattgataataaaatacctatttttggtatttgcctaggccatcaaattttatcattagctctaggagcaaaaactaaaaaaatgtcactaggtcacagaggtgcaaaccatcctgttaaagatctaaccacaaataaagtcgaaatcacaagtcaaaatcatggttttgaagttgatgctaaatcaattcctaaaaatgtaaaagtcacccacaaatctctttttgatgggtctatcgaaggtatagaggtaaaagataaaaaactattttcagttcagtatcatccagaggctaatcctggaccacaagatagtaaatatttattcgaaaaatttttaaacaacataaaatcaaataaaaatgggaaaaagaaaagatattaa

SEQ ID NO: 319470 - DNA, 1102 bp, Unknown
  Bacterial polypeptide expressing nucleotide sequence isolated from the Sargasso Sea
ttgagcactaatcaaccagcagtactattactggaagacggtcgtgtgtttaatggagaatctttcggctatattggtcaaacaataggtgaggtttgttttaacacaggtatgtctggttatcaggaaattttaaccgacccatcctattgtaaacagatagtaacaatgaccgcgcctcatattggtaactacggtgttaacccggaagatatagagtctaagcatattcaggtttctggctttgctattaaagaagaaactactattccatctaactggcgttccgttcaatcaattggtgattatttaaaggagcaaaaaattgcaggcattaaatcaattgatactagagcattaacgcgacatattagaaatcaaggagccatgaacggaattatttcatcaacaatagttgatgtagatactttaaaaaaggaattatcgaaagcaccatctatgaatggtcttgatttagctaaagcagtcactacaaaagaaaaatttcgatggacaaagaagaaaaaaatgaattataaggttgcggctattgactatggtataaaacaaaatattctccgtttattagaggagaattcttgcgatataactgttttcccagcagagacggattctcaagaaattattaacttcaatcctgatggtgtttttctaagcaatggccctggagatccatctgctgtgacttatggtattgcaatggtaaaagacctactagggaaaaaaccaatttttggtatttgcctaggtcatcaaatattagctcttgctctaggagctaaaactttcaaattaaaatttgggcatagaggaattaatcatcctgtcaaaaatctacaaacaggtgtggttgaaattacgagtcaaaatcatggatttgctgttgatttggatacgcttccatcaaacgtgatacctactcatgtaaatttaaatgataatacttctgcaggattaatgtgcaaggattttccagcattttctgtacaatatcatccagaatcaagtcctggacctcatgatagtagatatttatttcaaaattttataaagatgatgaaagatgccaaaaagaactgat

SEQ ID NO: 319471 - DNA, 1123 bp, Unknown
  Bacterial polypeptide expressing nucleotide sequence isolated from the Sargasso Sea
aatgacagaaaaaaaagtatatttatacctggattccgaaagattttttgaaggtttttccgttggaaaaaatgctgatacttgcggagaagtcgtttttaatacttctatgtctgggtatcaagaaataatttctgatccatcttataccgatcaaattattaattttacataccctcatataggtaacgtaggaactaatgatgatgatttagagtccgattcaaacggatgtaatggggtcatcatcagagatccgtcaacaattacaagtaattggagaaaacaggatgatttatcaaacttcctaaagacaaaaaatatttcaggtatttatgggattgatactagaaaagtcactcgaataatcagaaacgaaggcgcaaaagtaggtgccatcgtttccggcaaagatcataaaaagaaagcgcttaaattaattgaagagtttgtgcctttaggtggaaaagatctcgcctcagttgtttcaacgaaaaaagtatacgaatggaaagaaccctcttggaggaaggatttcgatgataataatttaaaaatagttgcgatcgattttggagtaaagcacaacattttacgaatgcttaaagatagaggatttcaagtgatcgtggttccagctaaaacaactgctgcagagattatggcaatgaagcccgacggagtatttctttctaatggacctggtgatcctgaaccctgcaagtatgcaattaaatgcattaaggaacttaggacaaaaagaattccaatgttcggcatttgtttaggccatcaacttttaggattagctttgggaatgaaaactatcaaaatgaagtttggacatcatggcgccaaccatccagttaaagaattggattcaaatagagttttcataacgagccaaaatcatggatttaccattgattcgaaatcaattcctgaggatgtaaaaattacacacctttctttatttgatgaaaccattcaaggaatagaaacatccgataaaagatgcttcagtttccaaggacatcctgaagccagtcctggtccgcaagaaatacaagaattatttgataaatttttaacagtgataaaaagcaatgccaaaaagaaatga

SEQ ID NO: 319472 - DNA, 499 bp, Unknown
  Bacterial polypeptide expressing nucleotide sequence isolated from the Sargasso Sea
ttcttgcaaacaagtgctaatgatattttaaaattaaaacctaatggaatttttttatctaatggtcctggtgatcccgcagcaactggaaaatatgctattccaattataaaggagtttataagaaataatttgcctgtttttggcatttgtttaggccatcaattacttgggctagccttaggagcaaaaacaaaaaaaatgaatttaggtcacagaggtgctaaccatccagttaaaaatttaataaaaggaaatgtagagattactagtcaaaatcatgggtttgagatagtaaaaaaaaatctacccaaaaatatacaagtcactcatcaatctctttttgataatagtatagagggcattaaactaaaatctaaaccagttttttctgttcaatatcatcctgagtctaatccggggcctcaagacagtgtttatttatttgaagaatttataaatagtatgaaaaaaaatgccaaaaagaaaagatattaaa

SEQ ID NO: 319473 - DNA, 895 bp, Unknown
  Bacterial polypeptide expressing nucleotide sequence isolated from the Sargasso Sea
ttgaccacaaaacaaaaaaaaaagaattcaattaaacctcaattttctccagctattttagttctcgaaaataaatcaatatttagaggaattggcttaggttaccaaggaaatgcaactggtgaaatttgttttaatacttcgttaactggttatcaagaaattatatctgatccatcttatgctggacaaataataaattttacttttccacatataggtaatgttggggcaaataatgaggatttagaatctgacataatatggacaagaggggttatttttaactctgaaataaccagtccatcaaattatagatctctgaaaaatctagatgaatggcttaaaaaaaataaaatagttggaataactggacttgatacaagaagtctaacaaattttataagagacaaaggtgctcccaaaggaacaatatcaaacaaaaaaaatggaaattttaatattaaaaaattaattaatatctctactaaatggcctggattaaacggtttagacttagcaaaagatgtaaccacaaaaaaaacatatacttggaaaggtttaaaaacttggcaaaaaggaaaagggtttaaaaaaaatagaaagaaatcaataagaattgttgcgatagactatgggataaaaaaaaatattttgaggtatttttcaaatttcaattgtgaagtaaaagtagtttcatgcaaacaaactgctgaagaaatattaaaattaaaaccaaatggtatttttttatccaacggacctggtgatccagcggcaacaggaaaatatgcaattcaaactgtaaagaaattaattaataataatttacctgtttttggaatttgtttaggacatcaaattcttgccttggccttaaatggaaagactaaaa

SEQ ID NO: 319474 - DNA, 940 bp, Unknown
  Bacterial polypeptide expressing nucleotide sequence isolated from the Sargasso Sea
tttgagacaggtaaaaaacagaaaaaacaaatctaataatttttcgacaggtattttagtttttgaagatggcaccaaattttttgggacaggcattggttatgaagggaatgccgttggggaagtttgtttcaacacatccattactggttaccaagaaataataacagacccctcttattctgatcagattataaatttcacatttccccacattggtaatgttggaacaaatcttgaggataacgaggctgataaagtctgggcaaaaggggttatccttaattctaatgttacagagccatctaattatagatcgattaaaaaactagataaatggcttaaaaaaagaaaaatcatcgggatagtaggtttagacactagagttataactaattacattagagataaaggtgctcccaaaggatcaatacagtttttaagaagaggaaatcataatttaaaaaaacttttaaaaaatgcaagatcgtggaatggattattaggcttagacttagctaaaaaagttacttgtaaaaaagtttataaatggaaatcttttaaatcttggactaaaaaaaatggttacgttaaaaataataaaaataaatatcaaattatcgcaattgattatggaatgaaaaaaaatcaattaagatgtttttcagatattaattgtggtgtgacagttgttccagcaaattttccagcagatgagattttaaaatttaaaccacatggtgtttttttatcaaacggtccaggagatcccgcagcaacaggaagttatgcaataccgattgtaaaaaaattaattaaaaataaaatacctatttttggtatctgtctaggtcatcaaattttgtcattagctcttggggcaaaaactaaaaaaatgtcactaggacacagaggggcaaaccatccagttaaagattta

SEQ ID NO: 319475 - DNA, 157 bp, Unknown
  Bacterial polypeptide expressing nucleotide sequence isolated from the Sargasso Sea
atggataaaaattgtatcttatatttagaaaacggtgaagtttttactggctctagctttggttttgaaggagaagtcttaggagagatagtctttaatacatcgatgactggttatcaggaaatattaacagatcccattcttatcattctcaagt

SEQ ID NO: 319476 - DNA, 1138 bp, Unknown
  Bacterial polypeptide expressing nucleotide sequence isolated from the Sargasso Sea
ttgaaagagagcaatgcaatacttctatttgaaaatgggacaaagttccatggccaatctataggaatagatggaataaagtctggtgaagtagtttttaatacatctatgacaggctatcaagagatattgactgatccttcatatcatagccaaattattaattttacgaatccacatattggtaacacgggtataaatgaagaggatattgagtcaaatcagattcatgtctctggcatgattatcagagatttagagatacgagctagtagctggaggaaaactagcacattgtcagagtatttggtgaaaaataacgtaattggaatgtcaggtgtcgatacaagagaaattacaagactcctcagagacaaaggctcattaaacgcatgtatgatgtgtaataaaaatttatcttcgcatgatatggcagcagaacttagcaagtttccaggattggttgggcaggatttagcgaaactagtttctacaaaaaaaatttatgattggaatgaaggtagtattcatctcaatggagagaaaattaaaaagcctcgacatgaattaaaggtcatagcatacgactttgggatcaagcaaaacattttaagaatactgaaagatttaggatgtactgttaaagtggtacctgctactttttcagcagaagaagcactagaatataatcctgacggtattttcttgtcaaatggaccaggagatcctgaggcttgtcattatgccgtgaaaaatataaaagagcttttaaagcataaaataccgattttcggtatttgtttaggctttcaattactcggtatttctgttggtggcaaagctattaagatgaagtttggtcatcatggagcaaatcatccagttattgatcttgatactaaaaaagtacttatcacgagtcaaaaccatggtttcatgatagatgaaaaatcactaccttcaaatatccgcctaactcatagatcattatttgatgactcattacaaggtatagagttgtctgattgttacgcttatggattccagggtcaccctgaagctagcccgggtccgcatgatattcatcacatattcaataaattcattaatttcatgaaagagagtaaaaatgcctaga

SEQ ID NO: 319477 - DNA, 1051 bp, Unknown
  Bacterial polypeptide expressing nucleotide sequence isolated from the Sargasso Sea
tttgatgttggtgaattagtatttaatacatcaatgactggctaccaagaaattattacagatccatcatacaaaaaacaaattattacatttacacaccctcatattggtaatactggaattaacattgaagacagtgaatccaattcaattcatgcctcaggcatagttgtaaaaaattattgctctaaacctagcaattggagatcaaaatttaacctagaggaatttttagttaaaaacgaaattattgggatctctgatattgatacaagagaaatcacatcattgcttagagaaaaaggtgcaatgggttgttgtattgcatcattgtcattgatttcagaaaatgatgcagtttctgctgcaaaaaattttgatggcctcgagggaatggatttagcaaaggttgtttcaacagattccgattatgagtggaataagggtgtctggccggaaaataattcatcagaaaaatcatactcagtagtggcatatgattatgggataaaggaaaatatcttaaggcttttaactgagtatgttggaaaagtaaaagtagtaaatgctaaaactacctttgaagagataatcgaattaaatcctcaaggtatatttttatcaaatggtcctggagatcctgaaccatgcgattatgcaattaaaaatattaggaagtttatatctcaaaaaattccaatttttggaatttgtcttggccatcaattattagctttagcaggtggcgctaacacatacaagatgaagtttggtcatcatggtgctaaccatcctgttcaagatattcttacaaaagaagtttttatcacaagtcagaatcatggttttgcagtagatgaaaagacattgcctaaaaatattagtgcaacacatctgtctctttttgatcagtctctccaaggtatagaatttaaagatgtgcccgcttttagctttcaaggccatcccgaggcaagccctggacctcaagagattcaaactctttttaaaaaatttagtttaatggtaaaagagtatgccaaaacgtaaa

SEQ ID NO: 319478 - DNA, 1117 bp, Unknown
  Bacterial polypeptide expressing nucleotide sequence isolated from the Sargasso Sea
atgactaaagaaaaagcaattcttgcattagcagatggaacaatcttcgaaggtacaagtattggcgcttcaggtcaggtaaatggcgaaattgttttcaacacttccatgacaggttatcaagaaattcttacagatccttcatatgccaagcaaatagtaaccttaacttacccacatattggaaatacaggaacaaatagtgaggatactgaatcagataaaatttggtgttctggattggtaataaggtcgctttctcaggcagaaagtagttggcgcaatactgaagctttatccgattacctcattagaaataatattcaaggaatatccgatatagacacaagaaaattgacaagaataataagagaaaaaggtgctcagtcagcatcaatatttactggtaactcagttgactcaaacaacgcagtagatttagcgaaagattttgaaggtttagctggtttagatctcgcaaaagaagttacaacagaatctagttatgattggaaagaaggaacatggagagtatgtaatggtgaatctgattttagagttgcagttttagatttcggaattaaaaaaaatatattaagaatattagttgatcaagggtatgaattaaaaattttccccgctaaaacttcttgccaagaaattttagatttcaaaccaaatggggtgtttttatctaacggacctggcgatcccgaaccatgtatctatgccattgatacaattaaagaattaatccaaattagtatgcccatattcggcatttgtctaggtcatcaattactcgcaatagcattgggtggcaagacatcaaaaatgaaatttggtcatcatggtgcaaatcatcctgtccaagatctcaaaactagcaaagtttcagtaagctctcagaatcatggcttcacagtcgaagaaaattccttacctacaaatgttgagataactcataaatcgttatttgatggaactattcaaggaatccagcattcatctaaaccttttttcagttttcaaggccatccggaagccagccctggacctcatgatctagcatatctattctcaacatttgataaaaatatgactaaaaatgcctaga

SEQ ID NO: 319479 - DNA, 1082 bp, Unknown
  Bacterial polypeptide expressing nucleotide sequence isolated from the Sargasso Sea
agccacaggcgaagtttgctttaatacatcattaactggttatcaagaaatcatatctgatccgtcatatgcaggtcaaattattaactttacatttcctcatattggtaatgtcggaactaataaagaagatcatgaatctgataaaatatgggctagaggagtgatttttaactctgaaataactacaccctctaattacagatcgttcctgcatttagattcttggcttaagaaaaataaaattattggaattactggcttagacaccagaagccttacaaacttcataagagacaaaggtgcccccaaaggtactattgcttattcaaaaaaaggaaagtttaatattaataagttgactaattctactatcaaatggagtggattaaaaaatcttgatcttgcagaagttgtttccactcagaaaaattatatttggaaaggtcttaaaacttggaaaaaagaatttggatataagaaaaataataaaaattcatttcatgttgttgcaattgattatggaattaaaaaaaatatcctaagatatttctctgacttcagctgtaaagttactgtggtttcttgtaaaactagtgctcaaaaaattttagctttaaagccaaatggaatatttttatcaaatggtcctggagatccagctgcaactggaaaatatgcaatcgaaattattaaagaattaatcaaaaaaaatttaccaatatttggtatttgtttgggtcatcaaattttagcattagcattgggtggcaaaacaaaaaaaatgaaacttggtcatagaggagcaaatcacccagttaaaaatttaattcatgataatgttgaaataactagccaaaaccatggatttgaagtggttaaagaaacattaccaaaaaatattgaagtcacacataaatctttatttgataatagtattgaaggtatcaggttaaaaaacaaaccagtcttttcagttcaatatcatccagagtctaatccgggacctcaagatagtgtttatttgtttcaagaatttattaacaacatgaaaaaaaatgccaaaaagaaaagatcttaaa

SEQ ID NO: 319480 - DNA, 847 bp, Unknown
  Bacterial polypeptide expressing nucleotide sequence isolated from the Sargasso Sea
ttgatatttgaaaatggtgaagttttgtggggatatggactaggagtaaaaaaatatgttattggtgaattatgcttcaatacatctcaaactggatatcaagaagctcttactgacccttcatacactaaacaaataataacatttacctttcctcatattgggattgtgggaactaattcagaagatcaagaatctaaaaaaatttttgctgacggttgtataattaatcaaccatcagatttctattccagttggagagctgaagacgatctcaattcttattttattaaaaataatataccatgtttgtatggagtagatactaggtatttaacaaagaaacttgttaatgaaggtcctcaaaaaattgctttaatatattttggagaagaggataattctttaaaagttcttaaaagtgaaattcaaaaatggtcaggtttagaaaatttagatttagcaaaaatagtttcaactaatgttcaatataaatggaatgaaggtacgtggtcaaaatatcataataaaaaaaatatttataagtatagagttacatgtttagattttggaataaaacgtaatattttaagaaatcttcacgaatttaatctaaattcaacaatcttaaacctatcagcaagttttgatgatattatagcaactaagcctgatggtatatttctatctaatggacctggtgatccttatgctacaggtgaaaaaattttagatactttaaagaaattaattcaaactaaaattcctatttttggaatctgtttgggtcatcaaattctaagtattgcattaggagctaaaacaaaaaaaatgtttcaaggacata

SEQ ID NO: 319481 - DNA, 1195 bp, Unknown
  Bacterial polypeptide expressing nucleotide sequence isolated from the Sargasso Sea
ttgatcaaaaaacaaaaaaataaaattgcaattaaacatcaatttcccacaggtattttagttctagataataagctagtttttagaggaattggccttggatatcagggaacttcaactggtgaagtttgtttcaatacatctttaacaggatatcaggaaattatatcagacccatcttatgctggacaaattataaactttacatttcctcatattggaaacgttgggaccaataatgaggatttagaatctgataaaatttggacgaaaggtgttatatttaattccgaaattacttctccatcaaactatagagcattacatacattagatgaatggcttaaaagaaatcaaattgttggattaactggattagatactagaagcttaacaaacttaattagagataagggtgctccaaaaggtactattacaaataataaaaaaggtaaatttaacattaaaaaactaaccaatatgtcagttaaatggcctggcttaaatggattagatcttgctaaagaagtatcaacaaaaaaaacctatttatggaaagggtttaaaacgtggaaaaaggatgtcggatataaaaagaatacaaaaaagaaatttaaaattatagcagttgattatgggataaagaaaaatattttaagatatttctcagattataactgtgaggtaaaagtggtctcctgtaaaatgactgctgatgaaattgtgaaattaaaacctgatggtatttttttatctaatgggcctggagatccagcagctactggaaaatatgcaatcgacacggttcaaaaattaattaaattaaattatcctatatttggaatttgccttggtcatcaaattttagctttggctttaaatgcaaaaacaaaaaaaatgaaattaggtcacagaggtgctaatcatccagtaaaaaatttaattaatagttcagttgagattacaagtcaaaatcatggatttgttgttatagaaaaaagcttatctaagaatattcaaattactcataagtcactttttgacaatactattgaaggaattaagttaaaaaacaaacctgtcttttctgttcagtatcatccagaagcaaatcctggacctcaagatagccaatacttattcaaaaactttattcaagatgtaaaaaaacatgccaaaaagaaaagacattaaa

SEQ ID NO: 319482 - DNA, 304 bp, Unknown
  Bacterial polypeptide expressing nucleotide sequence isolated from the Sargasso Sea
atgccacttggacataggggtgcaaatcatcctgtaaaaaatttgataactaataaagttgaaataacaagccaaaaccacggttttgaggtagacttaaaatccattcctaaagaagtcaaagttacacataaatcactatttgatggatctatagaaggagttgaggttaaagaaaaaaaattattttcagttcaatatcacccagaagctaatcctggtccccaagatagtaaatatttatttgaaaaatttttaaacaatattaggagaagaaaaaatgggaaaaagaaaagatattaaa

SEQ ID NO: 319483 - DNA, 1201 bp, Unknown
  Bacterial polypeptide expressing nucleotide sequence isolated from the Sargasso Sea
ttgggcaaaaataaattacatcagtcttatatagaaattctcaaaaaaaacaatcattcagctttattaattttagaaaccggagaagtttttcatggatcaggatatggaaaaccaggaataaaaatgggggaagtatgctttaatacctcattgacaggctatcaagaaataattactgatccatcttacaatggtcaaataatcaattttacatttccacatattgggaatattggaacgaatcaagaagacaatgaagctaaaaagtcatatgcttcaggaatgatcactagagagctcccaacaggaagtagtaattggcgctcaaataaagatctcaatgactggctatttgaaaaaaatattactgggatttcaggattagacacaagacaacttacaaaaattattaaagataaaaatgctcctatgggtttgataagttacaatttaaataaaaaatttaatgtagatgcacttaaacagaaactgttatcacatcctaagataaaagggtcaaatttagtcccttctgtatcatcaatcaaatcttttaattgggacaaaagcacgtcatggcccaaaaacataaattctaataaaaacaaaatttttcatatattagcttatgactttggaataaaacacaatattctaagatgcctaaaggatctaaacttcaaaataacagtcgttccttataattttgattttgaagaacttaaaagtttaaacccagatggtatttttctatctaatggccctggtgatccttttgaaacatataaatcaattaagaaaaattttgataaattgttaaacttaaatcttccaatttttggtatttgcattggtcatcaacttttggctttagcttttggagctcaaactgaaaaaatgaaacaaggtcacagaggtgcaaatcatccagtttatagattaaaagataaaactgttgaaataacttcacaaaatcatggatttaaagttgttgaagaaacccttccttcatttttaaagattactcataaatctctttttgatggtacaattgaaggattagagcataaatccaagcctatattttcagttcaatatcacccagaagcctctcctggtcctcatgacagtagatatttattccaacgattttataatttaatatcagatagatctaaaaatgcccaaaagaagtgac

SEQ ID NO: 319484 - DNA, 136 bp, Unknown
  Bacterial polypeptide expressing nucleotide sequence isolated from the Sargasso Sea
cttggctaattctgcccttttggtgttagaggatggttctgtttttaaaggtacggcgataggcgctacaggctccgccgttggggaagtcgtttttaatacttccatgaccggctatcaagaaattctcaccgat

SEQ ID NO: 319485 - DNA, 1102 bp, Unknown
  Bacterial polypeptide expressing nucleotide sequence isolated from the Sargasso Sea
atgtataaaaaggctttacttcttaaccaaaatggtgatgaatttttaggatggacaactgaattatttcaacctgctactggagagctcatatttaatacagcaatgacaggttttgtagaaatattaagtgacccgtcatatattaatcaaatagttactttcacttcttctcatgtgggcaactatggaatgtcccaaagagattttgaatctaacatgccaaaaattgaagcagctatcggaaattcttttactgactttccttcttcttggagatctgaaaaatcaataacatcatggctaaaagaatatgacataccttacagtggtgggtttgatgttagaaatattacaaaatatttacgagataacggttcgagcatgtttgcacttggcgtagatattgatattaaagatttaaaagacattttatataaagcaaaagatattcttggcgacaattcagcaatgacagcaggtaatcaagaagatagggatacatctactgatggaaaaatcggcatcatggatcttggagcaaaaaaaagcattgtaaatgtacttgaggaccatgattacgaagttgttatgatttcacctacaacaatgacagatgagatattgaagatgaacttaagaggccttttaatttcgaatggaccaggagatccaagatcattgctaacagtgataaatacaataaaagaactcattggaaaacttccaatatttgggatttgtcttggtcatcagatccttggtttagcttgtggtcttaaagttaaaaaaatgcaatttggtcatcatggttcaaatcatccagtagtaatagatggagtaaagaaagccctgataactgctcaaaatcatggtttttctattgaggaatttggagatagttataaacataagaattttggaaatataaatgtttttgcaaaaaacttgaatgatggatcaaacgagggaattagtctttgggactctatggcttattctgttcaatttcacccagaatctggccctggcacgactgatggcctacaaatttttaatcctttttttgaaatgatagagaataactatgccaaaaaataaa

SEQ ID NO: 319486 - DNA, 834 bp, Unknown
  Bacterial polypeptide expressing nucleotide sequence isolated from the Sargasso Sea
ataaaggtatagtcgccatcgcgggagtggataccaggcgtttaactcgaatactcagagctaagggaagtttgtcgggttgtatcatagctggatctgcggctactgattctgatattgaaaacaaggcgctgaaagaggcaaaaggattcgagggtttgcagggtatggatctggctaagatcgtgacccaaccagcgagagattggactcaatcaagatggtcaataagcgatggttatgctcaacaaactgaaaccaaatttaaagtggtggcttatgattttggcatcaaaaacaacatactgcgattattagcggaaaaaggatgtgacctttcggtagtgccagcgcaaacttccgcagatgaagcgctaaagttaaaaccggatgggatttttctctcgaatggtccaggagatcctgagccttgtgactatgcgataagtgcaatccgaaagttttttgaagtcgaaattccggtctttggtatttgtctgggacaccaattgctttctttagccagcggcgctaagtccttaaaaatggaacatggccatcatggggcaaaccatccggtaaaggatcttgagactgaagctgttgtgattactagtcaaaatcacggtttcgctatcgacgaatctagtctacctgaaaacttagagtgcactcacaggtcattgtttgatgagagcgtccaaggggtgcggagacttgatcttcctgttttcggttttcaaggtcatccagaagctagtcctggtccgcaagattgtgagtatttgtttgaccgatttattgatttgatgaatgagaaccgcaatgcctaag

SEQ ID NO: 319487 - DNA, 754 bp, Unknown
  Bacterial polypeptide expressing nucleotide sequence isolated from the Sargasso Sea
caataaaaaaggaaattttaatattaaaaaattaattaacacctcaactaaatggcctggattaaatggtttagacttagctaaagaagtaacaacaaaaaaaacatacacctggaaaggattaaaaacatgggaaaaaggcaaaggttttaaaaaaaataaaaagaaatcattaagaattgttgcgatagattatggaataaaaaaaaatattttaagatatttttcaaattataactgtgaagtaaaagtagtttcatgtaaacaaactgctgaggaaatattaaaattaaaaccaaatggtatatttttatcaaatggacctggtgatccagcagcaacaggaacatacgcaattcaaactgttcaaaaattaattagttctaatttgcctgtttttggaatttgtttaggacatcaaattcttgccttagccctaaatggaaagacaaaaaaaatgaaacttggacatagaggtgccaatcatccagtaaaaaatttagataataaaaaagttgaaataacaagtcaaaaccatggttttgaagttataaaagaaagtttatcaaaaaatatcaggataactcataaatccctttttgataattctatagaaggaattaaattaaaaaataaacctgtattttcggtacaatatcatcctgaatcaaatcctggtccacaagatagtcattatttatttaacgattttattaaagatgtaaaaaaatatgccaaaaagaaaagacattaa

SEQ ID NO: 319488 - DNA, 407 bp, Unknown
  Bacterial polypeptide expressing nucleotide sequence isolated from the Sargasso Sea
aggtagtaaaatagttgatgtgattaaaaaattaattgatgataatattccaatatttggaatatgtttaggacatcaaattttaggattggcattaaatgcaaagacaaaaaaaatgtttcagggtcacagaggttcaaatcatcccgtcaaaaatcttgcaacaggcattgtggaaattacttcacaaaatcatggctttgaagttgatagagatagttttggcaaagatataattgaaactcatgtttcactatttgatgggactaatgaaggtttaagacataagcatttaccagtatttagtgttcaatatcatccagaggcgtcgcctggtccacatgatagtcattatttgtttgaagaattttataaacttattgagaaaaatgccaaaaagaactgac

SEQ ID NO: 319489 - DNA, 345 bp, Unknown
  Bacterial polypeptide expressing nucleotide sequence isolated from the Sargasso Sea
tttttggaatttgtttaggtcatcaaatactaagtttagctttaggtgctaaaactaaaaaaatgtttcaaggacatagaggagcaaatcaccctgtaaaaaatatacaaacctctcaagtagaaattacatctcaaaatcatggatttgaagttgataaaaattcttttccatcaaatattattgaaactcatatttctctttttgatggtactaatgaaggtatagaacataaagagcttcctatttttagcgttcaatatcatccagaagcaagtcctggtccgcatgatagtcattatttatttaaaaaattttataaagaagtagaaaaatatgcctaaa

SEQ ID NO: 319490 - DNA, 214 bp, Unknown
  Bacterial polypeptide expressing nucleotide sequence isolated from the Sargasso Sea
atgaaagaagcgattttattattgcaagacgggagtctttttagtggtaaatcacttgggcacataggtgaaacggttggtgaagtctgttttaatactgggatgacaggatatcaagaaattctgactgatccctcatactgcaaacaaatagtcaccatgacctctcctcatgttggtaattatggaatcaatgccaatgatttggagtcaa

SEQ ID NO: 319491 - DNA, 1156 bp, Unknown
  Bacterial polypeptide expressing nucleotide sequence isolated from the Sargasso Sea
attcggcacagaagaatagcagagggggaactagtgttcacaactgggatgtgcggataccaggagagcctcacagatccatccttcgctggccaggttctgactttcacttatcctctcttgggaaactatggggtccaccctggcgtctcagagtcctcctctgttcatcctcgaggagtggtttgcaaacagcatatgactttccccgatcatagggactccgttgggagcgtgcatgatttactagtggcgcacaacatacccgggatagaaggaatcgataccagggcactcactcggagagtcagggagcatggcaccttgctatgcgttttcggtccagccgaaagggccgatgaaatggcgaccattctccgagagatgactcctccggatgcagacgatctggttgccgaggtaacttgcgatgaaccaagactactgaatcccggagctacagatgaaaaaggggaatcactccctcgtcttgccgctatagattgcggagtcaagcataatatcctgagggaattgtgccgaagattcgaggttgtctggtgtccagcgagcatgactctggaggagatgaacagggactggtcccctgacgcactattcgcctcaaacgggcctggagacccggctcatccgggagcagcgaccgacgctcgtaagactctagcaactgcggtccgccaaggcatgccggtgatggggatttgcctggggcatcaactgatggggctggcagccggtctgagaacttacaagctacgatatgggcatcgaggatcgaatcaacctgtcatggatctagaaaccaggagggtccacatcactagccagaaccacggatttgctgtagaggaccctatccagggaatgctggcaccacatcccagcggtgcgtgctcagaggtgacagacaatgttctgggggccgaattcaaagtcagacacgtcaactccaatgacgggaccgtagaaggccttgatcttctggacaaaccagcattcacaatccagttccatcctgaggcctgccctggccctcatgacgcatctccacttttcgatagattccagaacatggtggctgagcacctgagtagagcaggggcagagatcgtaacaaaggacggcggtgcctgat

SEQ ID NO: 319492 - DNA, 1102 bp, Unknown
  Bacterial polypeptide expressing nucleotide sequence isolated from the Sargasso Sea
atgcaaaaattaaaaaaggctatcctatttctagaggatggccttttttttaccgggaaaagtcttggtagcaatggtgaaacttttggtgaagtttgctttaatactgggatgactggatatcaagagatactaactgatccttcctactctaatcagatgattgtaatgagtagtccgcacataggtaattatggtactaataacaacgatacagaatctgaaaaagtttatgcaacaggttttataattaagagcgaatctttacagccttcaaactggagatctgaagaatctctttcatcatttttgaaaaagcacaatatagttggtattcaagacattgacacaagagcattaactattcacataagaaaaaatggtgcaatgagaggaatcatttcaactgaagattttaatcttgatagtttggtaagcaaaattgagaatatacctaaaatggaaggacaagatttagcaattaaagttgcaagaaagaaaaaagttattttatcaaacactgataaccctgtttataaaattgcagccattgattttggaatgaaaagcaatatatatgatattatgcttgatcataaggctgaagttgaaatttttccagcaaatgtatcgcacgatgaaatacttgcttctaacccagatggggtatttttatcaaatggaccaggagaccctgctgctgtaacatatgcaatagaaacggtaaaaaatttattaggtaaaaaacctatatttggaatatgtcttgggcatcaaattcttgctctagcattaggtgctaatacatttaaaatgaagtttggtcataggggtattaatcaaccagtaaaaaatttaattacaaacaaagttgaaattacatctcaaaatcatggatttgctgtcgacaaagattctcttccatctaatgttactgttacacataaacatttaaacgatgatactgttgcaggaataagctgcaatgatatttcggcatattcagttcaatatcatcctgaagccagcccaggaccgcatgattcacgatatgtattcaaagaattttttaatatgatgaagagcaatgccaaaacgtaaa

SEQ ID NO: 319493 - DNA, 1031 bp, Unknown
  Bacterial polypeptide expressing nucleotide sequence isolated from the Sargasso Sea
atatcagacccatcctatgtcgggacaaatcataaactttacatttccacatattggtaatgttggaaccaataaagaagattttgagtctgataaaatttggactaaaggggtaatttttaattcagaaataacttcaccatcaaattatagatcttttcaacatttaaatgcttggcttaaaaaaaataaaatagttggaattacaggactggatactagaagtttgactaattttatcagagacaaaggtgctccaaaggggactattgcttactcaaaaaaaggaaaatttaatattagtaaacttacaaacttgacaataaagtggagtggattaaaaaatttagatcttgcagaaacagtaaccacaccaaagaattatatttggaaaggactaaaaacgtggaaaaaaaaaataggttataaaaaaaatactaaaaattcttttcatgtagtagccatagattatggaatcaaaaagaatattcttaggtatttttctgactttaaatgcaaagtcactgtagtttcgtgtaagacatctgcaaaaaatattttgtctcttaaacctaatggtatatttttatcaaatgggcctggagatccagctgcaactggaaaatatgcaattaaaataattaaaagtcttattgaaaaaaaattacctttatttggtatttgtcttggtcatcaaatacttgcactagcattaggtgggaaaacaaagaaaatgaaattagggcatagaggtgcaaaccacccagttaaaaatttaattaatgacaatgtagaaattactagtcaaaatcatggttttgaagttgtcgaagaaaatttaccaaaaaatattgaggtcactcataaatctttattcgataacagtattgagggtattaaattaaaaaataaaccagtgttttctgttcagtaccatccagagtcaaaccctggaccacaagacagcgtgtatttatttcaagaatttattaacaatatgaaaaaaaatgccaaaaagaaaagatcttaaa

SEQ ID NO: 319494 - DNA, 1099 bp, Unknown
  Bacterial polypeptide expressing nucleotide sequence isolated from the Sargasso Sea
aatgtataaaaaagctcttcttgtaaatgaaaatggagacgaattcattggatggagtacagaagaatttaaaccagcaaccggagagcttatttttaatactgcaatgactgggtttgttgagatattaagtgatccctcatacataaatcaaataataactttcacatcttcacacgttggtaattatggaatgtctaaaactgattttgaatcgagtgaaccaaaaatagaagccgctatagctaactcttttacttataatccatcatcttggagatcagagaaatcaattacagattggctaaatgaatacaatatcccattcagtggaggttttgatgtaagagcaataacaactcacttaagagacgttggatcagatatgtatgcatttggaacagatattgacgcaaaagatttaaagaaattacttaagaaagcaaagagcataataggtgacgattcagcacttaaagctgggtcaggaaactcagaattcaaaaaaaccaaaggaaaaataggaattctcgatttaggagcaaagacaagtatcgctaatgttcttaaagaaaaaaatttcgatactgttttaattaatccagaaactaagcctgatgaaattttatccttagagctttctggattacttatttcaaatgggccaggagacccaaggtctttaactcaggttatagagaatgtaaaaaacctaattggaaagttgcctatattcggcatctgcttagggcatcagattttaggattggcttgtggattaaatgttgaaaaattggattttggacaccacgggtcaaatcatcccgtaaagattgatggaataaagaaagctttaattacttctcaaaaccatgggtttagtgttgagagtttaaatgaacctattaagcatgaaaaatatggaaatataaaagcgtacgcaacaaatttaaatgatggaagtaatgaaggtatcagcctttgggattcaaatgcctactcagtacaatttcatcctgaatcaggacctggaacaacagatggtttacaaatttttaatccatttatagaaatgattgaggaaaaacatgccagctaa

SEQ ID NO: 319495 - DNA, 1195 bp, Unknown
  Bacterial polypeptide expressing nucleotide sequence isolated from the Sargasso Sea
ttgactataaaacgaaaaaaaaaagtccaaattaaatctcaattttccccggctattttagttcttgaaaacaagtccttttttaaaggaatgggtattggttatgagggagatgcaactggagaaatttgttttaatacttcacttacaggctatcaagaaattatttcagacccatcttatgctggacaaattattaattttacctttccacacatagggaatgtgggaacaaataatgaagatattgaatctgaaaaaatttggacaagaggtgttatttttaattctgaaataacagatccttcaaattatagatctcttcaaagcctagaccaatggctaaaaaaaaataagattgttggaataacaggtttggatactagaagtttaacaaattttataagagacaaaggcgcacccaaaggaacaatatctaataagaaatcaggtaattttaacatcaataaactaattaaaatttcaaacaaatggccaggactcagtggcatggatcttgctaaaatagttactacgtctaagacttatacttggaaaggagttaaaacctggaaaaaaggcaaaggatacgaaaaaaataaaaataaaaaaattagaatagttgcaatagattatggaattaaaaaaaatattttaagatatttttctaattatgactgtgatgtaaaagttgtttcatgtaaaaaaacagctgaagatattttaaaattaaagcctcaaggtatttttttatcaaatggacccggagatccagcggcaacgggtacctatgcaataaaaacagttcaaagtttaattaaaagtaatattccaatatttggaatatgtttaggtcatcaaattttagctctatctttaaatgccaaaacaaaaaaaatgaaacttggtcatagaggagcaaatcatccagtaaaaaatctagttaataataaagtagaaataacaagtcaaaatcatggatttgaagttattgaaaatagcttatcaaaaaatattcaaataactcataagtcactatttgatggaagtattgaaggaataaaattaaaaagaaaaccaattttttctgtccaatatcatccagaagcaaacccaggtccacaagatagcaagtatttgtttagtgattttataaaagaagtaaaaaaatatgccaaaaagaaaagacattaaa

SEQ ID NO: 319496 - DNA, 437 bp, Unknown
  Bacterial polypeptide expressing nucleotide sequence isolated from the Sargasso Sea
tggtcctggtgatcctgctgcaacaggaaaatatgcaataaatataattcaaaaaataattaaaacaaatattccaatatttggaatatgtcttgggcaccaactgttagctttggcacttaaagcaaaaacaaaaaaaatgaaattgggtcacagaggtgcaaatcatccagtaaaaaatctaattaatagtaaagttgagataacaagtcaaaatcatggatttgaagtgattaaaaatagtttaccaaaaaatgttgagatgactcacaaatccttatttgataattctgtagaaggaataaaattaaaaaataaacctgttttttctgttcaatatcatccagagtcaaatcctggtccacaagatagtcattatttatttaatcaatttattaatgaagtaaaaaaaaatgccaaaaagaaaagatattaaa

SEQ ID NO: 319497 - DNA, 876 bp, Unknown
  Bacterial polypeptide expressing nucleotide sequence isolated from the Sargasso Sea
aagtttatgcaacaggttttataattaagagcgaatctttacagccttcaaactggagatctgaagaatctctttcatcatttttgaaaaagcacagtatagttggtattcaagacattgacacaagagcattaactattcacataagaaaaaatggtgcaatgagaggaatcatttcaactgaagattttaatctcgatagtttggcaagcaaaattgagaatatacctaaaatggaaggacaagatttagcaattaaagttgcaagaaataaaaaagttattttatcaaacactgataaccctgtttataaaattgcagccattgattttggaatgaaaagcaatatatatgatattatgcttgatcataaggctgaagttgaaatttttcctgcaaatgtatcacacgatgaaatacttttatctaaccctgatggtatttttctatcaaatggaccaggagaccctgccgcagtaacatatggtatagaaacagtaaaaaatttactaggtaagaaacctatctttggaatatgtcttgggcatcaaattctagctttagcattgggtgcaaacacattcaaaatgaagtttggtcatagaggtataaatcaaccagtaaaaaatttaattacaaacaaagtagaaattacatcccagaatcatggatttgctgttgacgaagatactctaccatcgaacgtcactgtaacacataaacacctaaatgatgatactgttgctggaataagctgtaatgatatttcagcatattcagttcaatatcatcctgaagctagtccaggaccacatgattcaagatatgtatttaaggaatttttcaatatgatgaagagcaatgccaaaacgtaac

SEQ ID NO: 319498 - DNA, 1195 bp, Unknown
  Bacterial polypeptide expressing nucleotide sequence isolated from the Sargasso Sea
attgatcaaaaaattaaaaaaagctcacctaaaaaattctcaaaaaaatacagctattttagttttagaaaataaaaagatttttaaagggatcggaattggatttcagggagaagcaactggtgaagtttgctttaatacctcattaacaggataccaagaaataatatcagatccatcttatgctggacaaataataaactttacctttcctcacattggaaatgtagggacaaacaaagaagattttgaatctgataaaatatggactaaaggagttatttttaattctgagataacatcaccatcaaattatagatcttttcaacatttagatgcttggttaaaaaaaaataagatagttggaattactggacttgatacaagaagtttaacaaattttattagagataaaggtgccccaaaagggaccattgcttactcaaagaaaagtaaatttcatattaacaaacttattaattctacgattaaatggagtgggctaaaaaatttagatctcgcagaaaaagtaactacgcaaaaaaattatatttggaaaggacttaaaacttggagaaaagaacatggctatagaaaaaataatcaaaattcatttcatgtggtggccatcgattatggaataaaaaaaaatattttgagatatttttctgattttaaatgtaaagtaactgtagtttcttgtaaaacaactgcagaaaaaattttatctcttaaacctaatggcgtattcttatctaatggacctggagatccagctgcaacaggaaaatatgcaattcaaataattcaaaatcttattaaaaagaaaatgccattatttggtatctgcctaggtcatcagatactcgcacttgcattaggtggtaagacaaaaaaaatgaagttaggtcacagaggagcaaatcatcctgtaaaaaatttaattaaagacaatgtagaaattactagccaaaatcatggctttgaagttgtaagagaaaatttaccaaaaaatattcagattacccataaatctttgttcgataatagtatcgagggaataagattaaaaaataatccagtattttcagttcaatatcacccagagtcaaacccagggccacaagatagtgtctatttattccaggaatttattaacaacatgaaaaaaaatgccaaaaagaaaagatcttaa

SEQ ID NO: 319499 - DNA, 1198 bp, Unknown
  Bacterial polypeptide expressing nucleotide sequence isolated from the Sargasso Sea
ttgaagaaaaaagcaaaaaaaactaactcaaaaacaaaatcacaaatcaatacaggcgttttagttcttgaaaataaaaaggtatttaaaggaattggaattggttaccaaggagaagctacaggcgaagtttgctttaatacatcattaacaggttatcaggaaatcatttctgatccttcatatgcgggtcaaattatcaactttacctttcctcatataggaaatgttgggaccaataaagaggatcatgagtctgataaaatatgggcaaaaggagttataattaactcagaaataacctcgccctcaaactatagatcttttctacatttagactcttggctaaagaaaaataaaattgttggaattactggcttagacaccagaagcctaacaagctttataagagacaaaggcgcccccaaaggtacaattagttattcaaaaaaaggaaaatttaatattaataaattgaccaactctacaataaaatggagtggattaaaaaatcttgatcttgcagaagtagtttcaacccagaaaaattatatttggaaaggtcttaaaacatggaaaaaagaagttggatataaaaaaaataaagagaactcatttcatgttgttgcaattgattatggaattaaaaaaaacatcttaagatatttctctgacttcaactgtaaagttacagttgtctcctgtaaaactagtgcccacaaaattttagctttaaaaccaagtggaatattcttatcaaatggtcctggtgatccagctgcaacaggtaaatatgctatagaaattattaatgatctaattaaaaataatttacctatatttggtatttgtttaggtcatcagattttggcattagctttaggtggcaaaacaaaaaaaatgaagttaggacatagaggtgcgaaccatcctgttaaaaatttagttcatgacaaagttgagattaccagtcaaaatcatgggtttgtagtagttgaagaaactttaccaaaaaaaattgaagtaactcataagtctctttttgataatactattgaaggaataaagcttaaaaataaaccaatattttcagttcaatatcatccagaatctaatcctggaccccaagatagtgtttatttgtttcaagaatttattaacaacatgaaaaaaaatgccaaaaagaaaagatattaaa

SEQ ID NO: 319500 - DNA, 894 bp, Unknown
  Bacterial polypeptide expressing nucleotide sequence isolated from the Sargasso Sea
gatgccccaaccttcgtcacgtcaggctcatctcgtgctggccgatggcacggttctcacgggtgacgcattcgggcaccgcggctccgtggtgggtgaggtggtgttcaacaccggaatgaccggataccaggaggtcctgacggacccgtcctatgccgggcagctggtcaccttcacctaccccgaactgggaaacaccggcgtgaatggggatgatcaggaggccgaccatccccatgccaggggagtgatcgctcgccagctcgccccatgtgccagcaactggcgctgttcggaatccctggacgactggatggaacgccatggtctggtgggcatctgcggtgttgacacccgtgccttggtgcgtcgacttcgtgatggaggagccatcaacggtgtgatcagcagtgatggacgttcgcccgctgacctgctggccgaggtccgtcgcgccccgagcatggagggcctcaatctggccagccaggtcagtaccaccgagccctacgaatggtcgtcgccatgccgcgtcggtttcgatcagcggctgaaacagcatcccgacctcccctaccgcgtggttgccattgacttcggcatcaagcgggcgatcctcgaccgtctggtcgcccatggctgtgcggtcaccgttctgccctcggatgccgatctggacacggtgttgtcccatcagccggagggggtcttcctctccaatggccctggcgatccggctgcggtggacagcggcatcgacctggcccgatccctgctggagctggccaatctgccgttgttcgggatctgcctcggccatcagattcttggccttgccttgggagggaagaccttcaagctcggctacggccaccgtggtctgaaccatcc

SEQ ID NO: 319501 - DNA, 574 bp, Unknown
  Bacterial polypeptide expressing nucleotide sequence isolated from the Sargasso Sea
tctttttcagtggttgcatatgattatggaattaaagagaatattttaaggcttttgactgagcatgtcggaaaagtacatgttgtgaacgctaaaactccatttgaagaaattattaagttaaatccaaaaggtatttttttatccaatggcccaggcgatccagagccttgtgattatgctattgaaaatataaaaaaatgtttaatgcaaaagcttccaatttttgggatatgtcttggccatcaattattggcgcttgcaggaggtgccaaaacatataagatgaaatttggtcaccatggggccaatcaccccgttcaagatatcattactaaagatgtttttataaccagccaaaatcatggttttgcagttgacgaaaagactttacccccaaatattaaagttacacatttatctctttttgatcaatctttacaaggtattgaatttaatgatgcccctgcattcagttttcaaggtcatcctgaagcaagtcctgggcctcaagagattcaaattctttttaaaaaatttagtttaatggtaagagagtatgccaaaacgtaaa

SEQ ID NO: 319502 - DNA, 1177 bp, Unknown
  Bacterial polypeptide expressing nucleotide sequence isolated from the Sargasso Sea
tatggaggtcgcgttgacaaagtctgccttactcgtactcgaagatggaaccgtattcactggcacagcaataggtgccgatggtctctcagttggtgaagttgtttttaacacttcgatgacgggataccaagaaattttaactgatccctcttattcacgccagatagtaactttaacctacccccacattggtaatactggtaccaataatgaagatgtcgaatccaatggggttcatgcttgtggtttaatcattcgcgatcttccgctcatagcaagtagtttccgtaatcaacaaacccttagcgattatctcaaagcaaacaatgttgttggcatcgcagatatcgatactcgtaaattaactcgaatcctccgtgaaaaaggtgcccaagcgggttgcatcatggcgggtgctgacttagatgaagcgaaagcactggctgcggctaaagccttccctggtttaaagggcatggatttagcgaaagaagtgacgacagagaaagcttacccatggcgtaaaggtagctggcgtttagtgggcggtttgcctgaagatactccagcagaagcgcttaaatacaaagtggttgcctacgactacggcgttaagcaaaacatcctgcgtatgttggttgaccgtggctgtgatgtgacggttgttcctgcaaaaacacccgctgctgacgtgttagcgatgaacccagacggtgtgttcctctctaatggtcccggtgacccagagccatgcgactacgcgattgaagcgattcaacaaatcctgaaaaccgatacgccgattttcggtatctgtttaggccaccaattactggcattggcatcaggcgcgaaaaccttaaagatgaagtttggtcaccatggtgctaaccacccagtgagcaatatcgaaaaaggtaacgtgatgatcaccagccaaaaccacggttttgctgccgatgaagccacattacctgccaatatcaaagtgacccacaagtcactgttcgatggttcactgcaaggtatccatctgacggataaacctgcgttcagcttccaaggtcaccctgaagcgagccctggtccgaacgatgcggccccactgttcgatcactttatcgagcttattgaacactatcgtcttgtaacgaaaagtcagaacgctaagtaa

SEQ ID NO: 319503 - DNA, 740 bp, Unknown
  Bacterial polypeptide expressing nucleotide sequence isolated from the Sargasso Sea
tcatattcgcaatcagggagctatgaatggaattatatcatcaacatcggtaaatattgacaatttaaaaagtaaacttttaaaagctccatcaatgaatggactagatttagcaaaagaagtaacaacaacaaagaagtttcgttgggccaaggaaaataattcttcaaattatcgtgttgcagctattgattatggaatcaagcacaatatcctacgtttactagaaagccattcgtgtgatgtgaccgttttcccagcaaaaaccacatcgcaagatattattgattttaatcctgatggtgtttttctaagtaatgggccaggtgatccatctgctgttacttatggaatttcaatggtaaaagatctgttgggcaagaagccaatttttggtatttgtttaggacatcagattttagctcttgctctaggagcaaagacattcaaattaaagtttgggcatagagggattaatcatcctgttaaaaatttgcaaacaggtgcggtagaaattactagtcagaatcatggttttgctgttgatctagaatcattaccctctaatgttataccaacacatgtaaatttaaacgataatacttctgaaggaatacgttgtaatgatattcctgctttttctgtacaatatcatccagaatctaaccccggacctcatgatagtagatatttgttcaatgattttatcaatatgatgaaaaatgccaaaaagaactgat

SEQ ID NO: 319504 - DNA, 621 bp, Unknown
  Bacterial polypeptide expressing nucleotide sequence isolated from the Sargasso Sea
gcagctggcagcttggcaaggggcacgtcaccccggctgccgaccagctcaaataccttttggtggcctatgactttggcgtcaagcgcaacatcctgcgcatgctggtggaccgcggctgccgcctgaccgtggtgccggccaagaccccggccgccgaggtactggcgctgaacccggatggcatcttcctctccaacggcccgggtgaccccgagccgtgcgactacgccatcgaggccatcgaggccttcctcaagaccaatatcccggtgttcggcatctgcctgggtcaccagctgctgggtctggcctccggcgccaagactatcaagatgaagttcggccaccacggcgccaaccacccggtgaagagcctggacgacaacaccgtcatgatcaccgcccagaaccacggctttgcggtggacgagcagaccttgccggattgcctgcgcgcgacccacgtctccctgttcgacgggtcactgcagggcatccatcgcaccgaccggccggccttcagcttccagggtcaccccgaagcgagcccgggcccgcacgactgtgccggtctgttcgaccactttattgaattgatcaagcagtatcgcgcttaag

SEQ ID NO: 319505 - DNA, 1195 bp, Unknown
  Bacterial polypeptide expressing nucleotide sequence isolated from the Sargasso Sea
ttgacatcaaaacagaaaaacaaaaaatcaaatttttctaatttacgttcagccattttagttctcgaaaataagtcaatattcaaagggattgggctaggttatcaaggagaagtaaccggagaagtttgttttaatacttcgttaacaggttatcaagaaattatatctgatccatcgtatgctggacaaataattaattttacatttcctcatataggaaatgttggcactaataacgaggatattgagtctgacaaaatttggactaggggtgtaatatttaattctgaaataacaagtccttcaaattatagatctcttcaaaatttagataactggctaaaaaaaaatagaatagttggaataactggtttagatactagaagcttaacaaattttattagggataagggagcacctaaaggtacgatagcaaattttaaagacggaaaattcaacataagtaagttaataaaaaaatcaataaattggcctggattaaaaggtatggatcttgctaaagaggtcacaacaccaaaaacttatacatggaaaggattaaaaacctggaaaaaaattaaaggatttgaaaaaaataaaaaaagaaaattcaagattgttgcaatagattttggaataaagaaaaatatacttagatatttttctaattatgattgtgaagttaaagtagtctcatgcaaaaaaaaatcggatgaaatttttaaattaaaaccgcatggtgtttttttatcaaatggtcccggagatccagctgctaccggaaaatatgcaattaatgttgtaaaaaatttaatacaagctggtttacctttatttggtatttgtttaggtcatcaaatattagcacttgctttaaacgcaaaaacaagaaaaatgaaattaggacacagaggtgccaaccatcctgtaaaaaatttaataactgatagagttgaaataacaagccaaaaccatgggtttgaagtaataaaagaaagcttaaagaaaaatactgaaataactcacttatccttatttgataattctattgaaggtataagattaaaaaataaaccagttttttctgttcaataccatcctgaggcaaacccgggtccccaagatagtaaatatttatttagtcatttcatggaatatgtaaaaaaatatgccaaaaagaaaagatattaaa

SEQ ID NO: 319506 - DNA, 1195 bp, Unknown
  Bacterial polypeptide expressing nucleotide sequence isolated from the Sargasso Sea
ttgatcaaaaaacaaaaagataactcaaataaatcttctaatttttactcgggcattttagttcttgaaaataaaaaaattttcaaaggaattggcatcggatatcaaggaactgcaactggagaagtctgttttaatacttcgctaacaggataccaagaaattatttccgacccatcctacgctggacaaataattaattttacttttcctcacataggcaatgttggaactaataaagaagatcatgagtcagataaaatttggacaaaaggtgtaatatttaattcagagataactaatccttcaaactacagggcattaaaaaacttagatatatggttaaaaaaaaataaaatagtgggattgaccggattagatactagaagtttaactaattttattagggacactggcgctccaaaaggaactatttccaacaataaaaaagggaattttaatataaaaaaactaattaatagatctattcattggcaaggtctaaataacttggatttagctgaaaaagttacaacaaataaaaaatacatctggaaaggatttaaaacttgggaaaaaggggtaggctttaaaaagaataaaaaaaaaaattataaaatagttgctattgattatggaataaaaaaaaatattttaagatatttttcgaactttaattgtgaagtaatagttgtcccttgttatcttgaagctgaagaaattattaaattaaatcctgatggtatatttttatcaaatggtcccggtgacccagcggcaactggaaaatatgctataaagataattcaagtattaatcaaaaaaaacatccctatatttggaatatgtcttggccatcaactattagccttggcactaaaagcaaaaacaaaaaaaatgaaattgggtcatagaggtgctaatcacccagtaaaaaatctaattaataataaagttgaaataaccagtcaaaatcatggattcgaagtcgtaaaagaaagtttaccaaaaaatgttgaggtaacacacaaatctttgtttgataattgtattgaaggtataaaattaaaaaataaaccaattttttcagttcaatatcatcctgaatcaaaccctgggcctcaagatagtcattatttatttaatcaatttattaacgaagtaaaaaaaaatgccaaaaagaaaagatattaaa

SEQ ID NO: 319507 - DNA, 424 bp, Unknown
  Bacterial polypeptide expressing nucleotide sequence isolated from the Sargasso Sea
tttatctaatggaccaggcgaccctaaagcaactggaaaatatattatcccagttttaaaagaaataattgaaaagactgaattacccattttcggaatatgtcttgggcatcaaatcttagcattagcattaggtggaaaaacaattaaaatgaaaacaggccatcatggtgccaatcatccagttcaagatttaaaaacaggaaaagttgaaataacttctatgaatcatggatttactgtagattcattgacgcttcctaaaaatgttaatgaaacacacatttcactttttgataaaagcaattgtggaatagctttaaaaaataagaaggttttttcagttcaatatcatccagaagcaagtccgggtccgactgatagcttgtatctttttaaggaatttatagataacttattataa

SEQ ID NO: 319508 - DNA, 1129 bp, Unknown
  Bacterial polypeptide expressing nucleotide sequence isolated from the Sargasso Sea
gataacaagctagtttttaaaggttatgggcttggatatgagggaatttcaactggagaggtttgttttaacacatctttaacaggatatcaggaaattatatcagatccatcttatgctggacaaattataaactttacttttcctcacattggaaacgttggaaccaataatgaggatttagagtctgataaaatttggacgaaaggtgtaatatttaattccgaaattacttctccatcaaattacagagcattacagacattagataagtggcttaaaaaaaatcaaattgttgggttaactggattagacactagaagcttaacaaactttattagagataagggtgctccaaaaggtactattacaaataataaaaaaggtaaatttaatattaaaaaacttaccaatatgtcagttaaatggcctggtttaaatggattagatcttgctaaagaagtatcaacaaaaaaaacttatatatggaaagggtttaaaacgtggaaaaagaatgtcggatataaaaagaattcaataaaaaaatttaaaattatcgcagttgattatgggattaagaaaaatattttaagatatttctcagattataactgtgaggtaaaggtagtttcttgtaaattaactgctgatgaaattgtgaaattaaaacctgatggtatttttttatcaaatgggcctggagatccagcagccactggaaaatatgcaattgatacggttcaaaaattaattaaattaaattatcctatatttggaatttgcctcggtcatcaaattttagctttggctttaaatgcaaaaacaaaaaaaatgaaattaggtcatagaggtgccaatcatccagtcaaaaattttatgaataattcagttgagattacaagtcaaaatcatggatttgttgttatagaaaaaagcttatctaaaaatattcaaattactcataagtcactctttgacgatactattgagggaattaaattaaaaaataaacctgtcttttctgttcaatatcatccagaagcaaatcctggacctcaagatagtcaatacttattcaaaaactttattgaagatgtaaaaaaatatgccaaaaagaaaagacattaaa

SEQ ID NO: 319509 - DNA, 370 bp, Unknown
  Bacterial polypeptide expressing nucleotide sequence isolated from the Sargasso Sea
atccagcacctattaaagaatactaatcttcctatctttggaatttgcctagggcaccaaatgttagcacttgctctaggcgctaaaacaataaaaatgaaccatggtcaccatggcgcgaaccatcctgttaaagagcacagttctggcaaggtagaaatcacgtcaatgaaccacgggtttgcagtggatgcccaaaccttgcctgatggagttgaagagacacacgtttcactctttgatggctcaaactgtggaataaagatgtcagacagacctgttttttctgtgcaacaccacccagaggctagcccgggacctcaagatagcttttacctattcaatcaatttgtagccactatggaataaa

SEQ ID NO: 319510 - DNA, 964 bp, Unknown
  Bacterial polypeptide expressing nucleotide sequence isolated from the Sargasso Sea
aactgacccatcttattgcaaacagattattacatttacccatcctcatataggcaatacaggtattaattctgaagataatgaatcagataatatatatgctgaaggagtcgttataagaaattatatctctcagccaagcaactatagatctgaagaaaatcttgataatttcttagcaagaaataattctattggcatttttggaatagatactagacagttaacaattattttgagggaaaaaggctctttgaaagcatgcattagtccaatagatgaaaataatgaagaatcagcaatatctttagcaaaaagctttgatggtcttgagggaatggatttggccaaagaagtaactacgaaaaatttttattcttggaatgagggagtctggcctgattataaagagtcaaaaagcaagctgcatattgttgcatatgactatggaattaaaaaaaatattttaagacttctttctgagcatgttggaaaagtaacagttgtaaatgcaagatcctcttttgatgaggttctaaacatgaatccagatggcatctttttatcaaatggacctggcgatccagagccatgcgattatgctattgaaaatattaaaagggcgctaaatgaaaatattcccatatttgggatctgccttggtcatcaactattagcacttgcaggtggtgcaaagactgaaaaaatgaaatttggtcatcatggggcaaatcatcctgttcaatctttaaaatctaaggaagtattcataacaagtcaaaatcatggctttgctgtgaatgagaactcattgccaaacaatattgagatctctcatgtatcactttttgatcaatcgattcaaggtatttcatttaaagataagcctgcatttagttttcaaggacaccctgaagcaagtccaggtccccaagatatagttagtttatttaagcaattttaa

SEQ ID NO: 319511 - DNA, 1038 bp, Unknown
  Bacterial polypeptide expressing nucleotide sequence isolated from the Sargasso Sea
aggaaattatatccgatccatcttatgctggacaaattataaattttacttttccacatatggaaaatgtcggtacaaacaaagaagatcatgagtctgataagatttggacaaaaggagttatttttaatactgaaataactaatccatcaaattatcgatccttaaaaaaattagatacctggctgaaaaaaaataaaattgtaggaataactggactagatactagaagcttaactaattttataagagacaaaggagcgcctaaaggtaccatttgtaataataataaaggtatttttaatctaaaaaaattaaccaatagctcaattaaatggccaggattaaacggccttgatttagcaaaaatagttacgaccaaaaaacaatatatatggaaaggtttcaaaacttggaaaaaagaaaaaggtttcgaaaaaaataaaaagaagaaatataaaattatagcaatcgattatggaattaaaaaaaatattttaagatatttttctaattttaattgtgaagtaattgtggttccttgtaaacttgaagctgaagatattattaaattaaaacctgatggtatttttttatcaaatggccctggagatcccgctgcaacaggaaaatatgcaataaatataattcaaaaattaattaaaaaaaatattccaacatttggtatttgtcttggacaccaattgttagctttagcgcttaaagcaaaaacaaaaaaaatgaaattgggtcacagaggtgcaaatcatccagtaaaaaatttgattaatagtaaagttgagataacaagtcaaaatcatggatttgaagtagttaaagaaagtttaccaaaaaatgttgaaatgacccataaatctttatttgataattctgtagaaggaataaaattaaaaaataaacctgttttttctgttcaatatcatccagaatcaaatcccggccctcaggatagtcattatttgtttaatcaatttattaacgaagtaaaaaaaaatgccaaaaagaaaagatattaaa

SEQ ID NO: 319512 - DNA, 860 bp, Unknown
  Bacterial polypeptide expressing nucleotide sequence isolated from the Sargasso Sea
ccaagtaattgggaggtcaaaatccactttaggcgaatttttaaaaaaaaatgaagttatagggatatcagacgttgatacaagggaaataacaacaattttaagagaaaaaggagctatgaattgttgtattgcatcgctttcagtaatttctgataaagaagccgttgcaaaagcaaaggcatttgaaggtctaaaaggaatggatttagcaaaagttgtctccacagataaagaatataaatggaatgagggagtttggcccgagaataataaatttaatgatgaatatcctgtaatagcatacgactatggtactaaagagaatatattaagacttttatgtgagcacgttggatctgtaaaagttgtaaatgccaaaactccatttgaagaaattattaaatataatccaaaaggtatatttttatctaatggtccaggagatcctgagccttgtgattatgctatagaaaacattaaaaaatttcttgaaaataagattccaatttttggtatctgtcttggtcatcaattattagctcttgctggtggagctaatacttacaaaatgaaatttggtcatcatggagcaaatcaccctgttcaagacatggcttccaaagatgtttttattactagccagaatcatggcttcgcagtagatgagaacactttacctaaaaatattaaagttactcatgtatctttatttgataaatcacttcaaggcattgaatttattgataggccagcatttagtttccaaggacatcctgaggcgagtcctggccctcaagagatacaaatactttttgaaaaatttagttctatggtaaaagagtatgccaaaacgtaaa

SEQ ID NO: 319513 - DNA, 889 bp, Unknown
  Bacterial polypeptide expressing nucleotide sequence isolated from the Sargasso Sea
ccattatcagagtattcaaattggagagcagaaaatgacttaaattcatattttttaaaaaataacattccatgtatttttggaattgacactagatacttaactaagaaattatctgttgagggggctaagaaggccgcaattattcactttggagaaggtgaaaataaaattgaaaaacttaaaactcaaataaatgagtggaaaggtcttcaaaatttagatttggcgggaatagtatcgacagagcaaaactataattggaaaaaaggaatatggaaaagtaacaaatcaattaaaaaccaatttaaatataatgtcacttgcttagactttggtatcaaaaataacattttaagaaatctaaatgaatttaatcttaacccaactgtattaaacttattttctagctatgaagaaataatagaaactaatccttcaggaatttttttatcaaacggccctggtgatccttatgccacaggtagtaaaatagttgatgtgattaaaaaattaattgatgataatattccgatatttggaatatgtttagggcatcaaattttaggattggcgttgaatgcaaagactaaaaaaatgtttcagggtcacagaggctcaaaccatcctgtcaaaaatcttacaacaggaattgttgaaattacttcacaaaatcatggctttgaagttgatagaaatagttttggcaaagatataattgaaactcatgtttcactatttgacgggactaatgaaggtttgaggcataagcatttgccggtatttagtgttcagtatcatccagaggcgtcccctggtccacatgatagtcattatttgtttgaagaattttataaacttattgagcaaaatgccaaaaagaactgac

SEQ ID NO: 319514 - DNA, 928 bp, Unknown
  Bacterial polypeptide expressing nucleotide sequence isolated from the Sargasso Sea
tcgatcatcaaaggaggtcgtctccctgttgagccatcgcgacgtacacgcgaggctcgcctggcttgaggcacggcagccggtcgccgtgacgcccttcagcctccgttctggctggcgcgccaacatgagcgagcatgagtacgggcagaaattcgcccgcgtgcaggcgtatctgcacagcggcgattgctatcaggttaacctcgcccagcgctttcaggcgagctacagcggggacgagtggcaggcgtttacgcgtcttaacgccagcaaccgcgcgccgttcagcgcgtttttgcgccttgaggatggcgctattctcagcctgtcgccggagcgttttattcatctggctgagggcaatattcagacccgaccaatcaaaggcacgctggcgcggcttcccgacccggaggccgacaggctgcaggggcaaacgctggcggcgtcaacaaaggatcgggcggagaatctgatgattgtcgatctgatgcgtaacgatatcggtcgggttgctgaaccgggaagcgtgcgggttcccgaactgttcgtcgttgagccatttccggcggtgcaccatctggtcagcaccatcaccgcgcgtctgccgccgcaccgcaccgcctgcgatctgctgcgtgcggccttccccggcggctcaatcaccggcgcgccaaaggtgcgggcgatggaaattattgatgaactggaaccgcaccgtcgcaacgcctggtgcggcagtattggctatctgagcctgtgcggaacgatggataccagcattaccattcgtaccctgaccgccagcaacggcactctctattgctccgctggcggcgggattgtggccgacagcaacgtgcaggccgaatatcaggaaacctttgataaagttaaccgtatactgcagcaactggagaactga

SEQ ID NO: 319515 - DNA, 250 bp, Unknown
  Bacterial polypeptide expressing nucleotide sequence isolated from the Sargasso Sea
aatgagtgttttttttaaaaagatattagtagccaatagaggggagatagcttgtagaataataaaaacagctcatcatatgggaataaaagttgttgcaatttattcagatgctgataagaacgcaaaacatgttagaatggcagatgaggccgtgcatattggacctccccaatccgcacaaagttatttattaatagataaaattattgatgctgcaaaactgacttcagcagaggcaatacacccc

SEQ ID NO: 319516 - DNA, 124 bp, Unknown
  Bacterial polypeptide expressing nucleotide sequence isolated from the Sargasso Sea
aatgttcaaaaaaattcttgttgcaaacagaggtgaaatagctgttagagttattagagcctgtaaagaatggggtatacaaacagtcgctattcactctgatgttgatagaaacagtatgcac

SEQ ID NO: 319517 - DNA, 301 bp, Unknown
  Bacterial polypeptide expressing nucleotide sequence isolated from the Sargasso Sea
aatgtttaaaaaaattttagtagcaaaccgtggtgagatagcggttcgtataattagagcttgtaaggaatggggtatatcaacagtagcagtacattccgatgttgatatagattctatgcatgtaagactagctgatgaaagtatatgtataggagcacatcaacctcaaaatagttatttaaacatcgcagctataatgtcagctgctgatgtaaccggagctgaagcattcatcctggctatggatttttatctgagaatgcccaatttgcagaaattgttaacaaacatggaataa

SEQ ID NO: 319518 - DNA, 235 bp, Unknown
  Bacterial polypeptide expressing nucleotide sequence isolated from the Sargasso Sea
atgttcaaaaaaattcttgttgcaaatagaggtgagatagctgttagagttattagggcctgcaaagaatggggtatacaaacagtcgctattcattccgatgttgatagaaacagcatgcacgttcgattagctgatgaaagtatatgtgtagggcctcatcaagccgcaagtagctatttaaatattccagctataatgtcagcaattgaattgacaaattctgaagctgttc

SEQ ID NO: 319519 - DNA, 964 bp, Unknown
  Bacterial polypeptide expressing nucleotide sequence isolated from the Sargasso Sea
aatgtttaaaaaaattctagtcgctaatcgaggtgaaattgcagtaaggataataagggcttgtaaagaatggggtatagcaacagtagcgattcactcagatgtagataaaaatagtatgcacgttagattggcagatgagagcgtctgtgttggaactcatcaaccagctaatagctacttaaatattccatcaataatgtcagcaattgaattaactaatgctgatgcagttcatcctggatacggctttttatctgaaaatgcagaatttgcaaagatattagaagattataaaattaagtttattggaccatcatcaaaattaataaaaatgatgggtgataaaattcaagcaaaaataattgctaaaaaatatggtttgcctgttattgaaggttctgaaggcggtgtttcagatataaatgaagcaaaaaaaattattaaaaatataggttttccagtacttataaaagctgcaggtggtggaggtggaaaaggaatgaaaatagttaataaagaagaagaatttgaaaatttatttttaacagcaaaattagaggcaaaaaagttttttggaaatgacgaagtttatattgagaaattttttcaaaaccctagacatatagaggttcaggtactatcagggaaaaacagaactgttcatcttcatgaaagagattgttctgtacaaagaaggcatcaaaaacttgtagaagaaacaccaagtcccattttaaataatgaattaagacaagatctttttagcaaaactgtaaaaatggtcagtcaaattggttatgaaggagctggaactgtagaatttatatatgagaataatagattttactttttagaaatgaatacaagagttcaagttgaacatccagttacagaaatggttactggaatagaaaatataaaggagcaaattaatatagctttcactggagaaactgcttaa

SEQ ID NO: 319520 - DNA, 442 bp, Unknown
  Bacterial polypeptide expressing nucleotide sequence isolated from the Sargasso Sea
tatgtttaaaaagattctggtcgccaaccggggggagattgcccttcgcatccagcgcgcctgcagtgaactcgggatcaaggccgtgatggtctactccgaggccgaccgcgacgccaagtacgttaagttggctgaagaggccgtctgcattggccctgctccctccccactgtcgtacctcaacatgccggccatcatctcggcggccgaagtgaccgatgcggaagccatccatcctggctacggtttcctgtccgagaacgcagacttcgccgagcgcgtcgaaaagagcggcttccagttcatcggccccacgcccgagtcgatccgcatcatgggcgacaaggtgtcggccaagcaggccatgatccgcgccggcgtgccctgcgtgccgggttccgagggcgagttgcccgacgacccggtgcagatccgccgc

SEQ ID NO: 319521 - DNA, 392 bp, Unknown
  Bacterial polypeptide expressing nucleotide sequence isolated from the Sargasso Sea
attgtttaaaaaaatattagtcgcgaatagaggggaaatcgcagttcgtattatacgagcatgtaaagaacttaacatcaaaacagttgccatacattctaatgtagatacagaagcgatgcatgtgaaactagctgacgaaagtgtctgcgttggtagcgcactacctaatgaaagttatctaaacattccaagtattataagtgcaattgatataactggtgctgatgcagttcatcctggatatggatttttaagtgaaaacgacaaatttgcaaaaatattaagttcacacaaagtaaaatttataggacctacatcaaaatcaattttagagttaggtaataaaagcaatgctttaaaactagcaagcaattttaaattacctattt

SEQ ID NO: 319522 - DNA, 361 bp, Unknown
  Bacterial polypeptide expressing nucleotide sequence isolated from the Sargasso Sea
tatgtttaagaaaattctagtagcaaatcgtggagaaattgctttacgagtaattagaacttgtaaagaaatgggcattaaaacagtagctgtctattcaaaagctgatgaggaaagtttacatgttagatttgctgatgaggcagtttgcattggaccagcgcctagctcagaatcctatctaaaaatccccaatatcatagcagcggcagaaataacaaatgcagatgcaattcatcctggatatggtttcttatctgaaaatgctaagttttcaaagatatgtggagaacataaaataaaatttattggcccatcaccagaaatgatgaaaaaatgggagataaggctactgctgttc

SEQ ID NO: 319523 - DNA, 622 bp, Unknown
  Bacterial polypeptide expressing nucleotide sequence isolated from the Sargasso Sea
aatgttcaaaaaaattcttgtagcgaacagaggtgagatagctgttagaattataagagcatgtaaagagtggggcatacaaacagtagctattcattccgacgttgatagaaatagtatgcatgtacgtttagcagatgaaagtatatgtgtaggtccacaccaggcagcgaacagttatttgaacattccagcaataatgtcagcaatagaattaacaaattctgaagctgttcatcctggatatggttttctatctgaaaattttgaatttgcaaaaattcttgaagagaacaaaattaaatttataggaccttcatcatcactgattaaaatgatgggtgataaaattgaagcaaaaaaaattgcaaaaaaatatggtcttccagtgattgagggatctgagggaggtgtaactgattttgcagaagcaaaaaaaatatgtaatcaaattggatatccggtattaataaaagccgctggtggtggtggtggaaaaggcatgaaggtcgttacaaaagaagatgaatttgaaaatctatttttaactgcaaaaactgaagctaaaaaattttttggtaatgatgaagtatatattgaaaaattttttcaaaaatcctag

SEQ ID NO: 319524 - DNA, 847 bp, Unknown
  Bacterial polypeptide expressing nucleotide sequence isolated from the Sargasso Sea
aatgttcaaaaaaattcttgttgcaaatagaggtgagatagctgttagagttataagagcctgtaaagaatggggtatacaaacagtcgccattcattctgatgttgatagaaatagtatgcacgttagattagctgacgaaagtatatgtgtaggtccacaccaggcagcaaatagttatttaaacattcctgccataatgtcagctattgaattgacaaattctgaagctgttcatccgggatatggttttttatctgaaaattatgaatttgcaaaaattcttgaacaaaacaaaattaaattcattggtccatcatcttcattaattaaaatgatgggtgataaaattgaagcaaaaaaaattgcaaaaaaatatggtcttccagtaattgaaggatctgatgggggtgtatctgattttgatgaagcaaaaaaaatatgtaaagaaattggttatccggtactgataaaagcagcaggtggtggtggtggaaaaggtatgaaagttgtcacaaaagaagatgagtttgaaaacttatttttgactgcaaaaactgaggcaaaaaaattttttggtaatgatgaggtatatattgaaaaattttttcaaaatccaagacatatcgaagttcaagtattatctggtaaaaatagaaccgtacatcttcatgaaagagattgttctatacaaagaagacatcaaaaactaattgaagaaactcccagtcctttactaaatgatcagataagaaaagatctttttgaaaaaactgtcaaaatgggtaagtcaaattgggatatgaaaggaggcgggtacagtagaatttattttttgaagatggga

SEQ ID NO: 319525 - DNA, 502 bp, Unknown
  Bacterial polypeptide expressing nucleotide sequence isolated from the Sargasso Sea
atgttcaataaaattctagtcgcaaatcgtggggaaattgcactccgggttatccgcgcctgccgcgagatgggtataaaatccgttgcagttcattctacagccgatagcgacgcgatgcacgttcggatggcagatgaaagcgtatgtattggtccggcagtaggaacttcaagttatttatctatgcctgctattatcgccgcatgtgaaattactggagcggaagcaattcatcctggatacggatttttgtctgaaaatgccaaatttgttcaaatagttgaagatcatgggataaagtttatcggtccaacagcggagcatattcgaataatgggtgataaaattacagctaaagatacaatgagagaactcggtgttccatgtgtcccaggatcagatggtggtgttcatgatatagatacagcaaaaaagattggagccgatattggttatcctgtgattatcaaagctactgcaggaggtggcggcagaggaa

SEQ ID NO: 319526 - DNA, 382 bp, Unknown
  Bacterial polypeptide expressing nucleotide sequence isolated from the Sargasso Sea
atgtttaaaaaaattttagtagctaaccgtggagaaatagcggttcgtataattagagcttgcaaggaattaagtataccaagtgtagctgttcattcagatgttgattttgagtcaatgcatgtcagattggcagatgaaagtatctgtataggttctcacaaacctcaaaatagttatttaaatattgctgctattatgtcagcgattgatgtaactggtgctgatgctatacacccaggatatggatttttgtcagaaaatcaccgttttgccgaaatagttactaaaaataaaataaagtttattggtcccagtgcagaaataatgaaaaagatgggagataaaattgaagcaaaaagaactgcgaaaaaacttggac

SEQ ID NO: 319527 - DNA, 298 bp, Unknown
  Bacterial polypeptide expressing nucleotide sequence isolated from the Sargasso Sea
atgttcaaaaaaattcttgttgcaaatagaggtgagatagctgttagagtaataagagcttgtaaagaatggggtatacaaacagtcgctattcattctgatgttgacagaaatagtatgcacgttcgattagccgatgaaagtatatgtgttggtcctcatcaagctgagaatagctatttaaatattccagctattatgtcggctattgagttgacaaattctgaggctgtccatcctggatatggttttttgtctgaaaattatgagtttgcaaaaatcctgaacagaacaaaat

SEQ ID NO: 319528 - DNA, 776 bp, Unknown
  Bacterial polypeptide expressing nucleotide sequence isolated from the Sargasso Sea
attgtttaaaaaaatattagtagcaaatagaggagaaatcgcagttcgtattattcgcgcatgtaaagagctaaatatcaaaacagtagctattcactctaatgttgatacagaggcaatgcatgtaaaactagctgatgaaagtatttgtgtaggtagtgccctaccaaatggaagttatttaaatatcccaagtattataagtgctattgatataaccggagctgatgcagtccatccaggttatgggtttttgagtgaaaatgataaattttcaaaaatattgagttcacataaagtcaagttcataggaccaagttctaagtctatcttagatttaggcaataaaagtaatgctttgagtttagcaaatgaatttggattaccaatattaggaaataaaaattcaaaagatataaaaaatacaagtgatgctgtaaaaatagcagagaatattgggatgcctatagtaattaaagctgcttatggtggtggaggtaaaggaatgagagttttttataataaaactgaaatagataagtttttttctcaattaaaagctgaagcaaaaaattatttcggtgatgatacaatgtatgctgagaagtttttaactaatgcaaaacatattgaatttcaagtaatatcagatcctaaaaataattatgttgaaataattggacaaagagattgctccattcaacgtaaaaatcaaaagattatagaggaaataccatctgattttgtacatatcaaaaatttggaaaaaatagaaa

SEQ ID NO: 319529 - DNA, 353 bp, Unknown
  Bacterial polypeptide expressing nucleotide sequence isolated from the Sargasso Sea
aatgttcaaaaagattcttgttgcaaatagaggtgagatagctgttagagttatcagagcctgcaaagaatggggcatacaaacagtcgctattcattctgatgtcgacagaaacagtatgcacgtgagattagctgacgagagcatatgtgttggaccacatcaggctgtgaatagctatttaaacattccagcaataatgtcagctattgaattaacaaattctgaagctgtccatcctggttatggttttttgtctgagaattatgaatttgcaaaaatcctagaacagaacaaaattaaatttattggcccatcatcttcgttaattaaaatgatgggtgataaaattg

SEQ ID NO: 319530 - DNA, 373 bp, Unknown
  Bacterial polypeptide expressing nucleotide sequence isolated from the Sargasso Sea
gatgatattgttcggtaagattctagttgcgaatagaggtgaaattgcctgtcggattatgaataccgctcagcggttaggaatcaaaacagttgctatatattcagaggtcgatgttgatgcgaagcacgtcaatatggcagatgaaagtatatgtattggcccgggcccatcgtcggaaagttatttagtgatagacggagtgttggaagcggctcaaaaaatgggagcggatgccattcatcctggatatggctttttgtcggaaaacaatatcttcgcgcaacgggtctgtgatgctggactagtttttgtgggaccctccccagattcattgcggcaatgggtgacaaaattggctccaaaaaactag

SEQ ID NO: 319531 - DNA, 1339 bp, Unknown
  Bacterial polypeptide expressing nucleotide sequence isolated from the Sargasso Sea
atgttcaaaaaaattcttgttgcaaatagaggtgagatagctgttagagttataagagcctgtaaagaatggggtatacaaacagtcgccattcattctgatgttgatagaaatagtatgcacgttagattagctgacgaaagtatatgtgtaggtccacaccaagcagcaaatagttatttaaacattcctgccataatgtcagctattgaattgacaaattctgaagctgttcatccgggatatggttttttatctgaaaattatgaatttgcaaaaattcttgaacaaaacaaaattaaatttattggtccatcgtcttcattaattaaaatgatgggtgataaaattgaagcaaaaaaaattgcaaaaaaatatggtcttccagtaattgaaggatctgaaggtggagtatctgattttaatgaagcaaaaaaaatatgtaaacaaattggatatccagtgttgataaaggcagctggtggtggtggtggaaaaggtatgaaaattgttaaaaaagaagatgaatttgaaaacttattcctaactgcaaaaactgaagcaaaaaaattttttggtaatgatgaagtatatattgaaaaatattttcaaaatccaagacatattgaggttcaagtattatcaggaaaaaatagaacagtacatttgcatgaaagagattgctctattcaaagaagacatcaaaaattaattgaagaaacccccagtccattacttaatgatcaaataagaaatgagctttttgataaaactgtaaaaatggtaagccaaattggatatgaaggagctgggactgttgaatttatttttgagggtggcaaattttattttttagaaatgaacacaagaatacaagtagaacatccagtaacagaagttgtgacaggcatagatttaataaaagaacagatctggattgcatatgacggtaatacagctttaaaacaggaagatattaagccaagaggtcatgcaattgagtgtagaataaatgctgaagatgtgagtaaaaatttccaaccctcgccaggagaaattaccatgtgtcatcaaccatcaggttttagaacaagggtagatggggctatatttcaaggctatagagtaactccatattatgacagcatgatttgtaaagtaatatgtcatggaaggaatagaactgaagcaattcaaagaatgcgaagatcccttgatgaatttgttatagagggtattaaaacaacaatcgacttacataaaatacttttaaatcacaaaaaatttttggattcagattttaatgtgagttggcttgataaagaaaaattactctaag

SEQ ID NO: 319532 - DNA, 1339 bp, Unknown
  Bacterial polypeptide expressing nucleotide sequence isolated from the Sargasso Sea
aatgtttaaaaaaattcttgttgcaaacagaggtgagatagctgttagagttattagggcctgcaaagaatggggtatacaaacagtagccattcactcggatgttgatagaaacagtatgcatgtaagattagctgatgaaagtatatgtgtaggtccacaccaagctgcaaatagctatttaaatattccagctatcatgtctgctatcgaattaacaaattctgaagctgttcatcctggatatggatttttatctgaaaattatgaatttgctaaaattcttgaacagaacaaaatcaagtttattggcccatcgtcttctttgattaaaatgatgggtgataaaattgaagcaaaaaaaattgcaaaaaaatatggtcttcctgtgattgaaggatctgatggaggtgtatctgattttaatgaagcaaaaaaaatatgtaaacaaattggatatccagttttgataaaggcagctggtggtggtggtggaaaaggaatgaaagttgttagaaaagaagatgaatttgaaagcttatttttgactgcaaaaactgaggcaaaaaaattttttggaaatgacgaggtatatattgaaaaattttttcaaaatccgagacatattgaagttcaagtattgtcaggtaaaaatagaactgtgcatcttcatgaaagagattgctctattcaaagaagacatcaaaaattaattgaagagacacctagccctttactaaatgatcaaataagaaatgatctttttgataaaactgtaaaaatggtaagtcaaattggatatgaaggtgcagggacagtagaatttatttttgaggatgaaaaattttattttttagaaatgaatactagaatacaggttgaacatccagtaacagaggtggttactggaatagatttaataaaagaacaaatctggatagcgtatgatggtaatactgccttaaaacaggaagatattaagccaaggggtcatgcaattgaatgtagaataaatgctgaagatgtgagtaaaaattttcaaccttcgccaggagaaattacgatgtgccatcagccttcaggttttaggactagagtagatggatcaatattccaaggatataaggtaactccctactatgacagtatgatttgtaaagtaatttgtcatggaagaaatagaactgaagcaattcaaagaatgcggagatccttggatgaatttgttattgagggtataaagacaacaatagacttacataaaatactcttaaaccacgaaaagtttttaaattcagattttaatgtgagttggcttgacaaggaaaaattactttaa

SEQ ID NO: 319533 - DNA, 1084 bp, Unknown
  Bacterial polypeptide expressing nucleotide sequence isolated from the Sargasso Sea
gatgttcaataaaatcctcgtagcaaatcgtggggaaattgccctccgggttatccgcgcctgccgcgagatgggtataaaatctgttgcggttcattctacagccgatagtgacgcaatgcacgttcggatggcagatgaaagcgtatgtattggtccagcagcaggaacctcaagttatttatctatgcctgcgattatcgccgcatgtgaaattaccggtgcggaagcaattcatcctggatatggatttttgtctgaaaatgctaaatttgtgcagatagttgaggatcacggaataaagtttatcgggccaacagccgagcatatccgcataatgggtgataaaatcacagctaaagacactatgagaaaacttggtgttccgtgtgtcccaggatcagatggcagtgttcctaatttagatacagcaaaaaagattggattagatattggttatcctgtgattattaaagctacggcaggaggcggtggcagaggaatgaaggtcgcaaactccgaggcagatatggaacaagctttcatgactgcaagagctgaaggaaaagctgcgtttggaaaccatgaagtttacatcgagaaatatctaaccaccccaagacatatcgagatccaagtttttggagatggcaaaggccaggctgttcatttgggcgaaagagattgctcacttcaacggcgtcatcaaaaagtttttgaagaagccccaggcccctgtatttcctcagaagaacgcgaaagaataggtgcaacatgcgcagaagccgtggcaaagattaattatattggcgcaggtacaattgaatttttatatgaaaacggtgaattttacttcattgagatgaatactagacttcaggttgaacatccaattaccgagagtatttttggtgttgatatagttcgtgagcaaatccgagtagccgctgggctagagatgacctttatacaagaaaatttatcaataaagggtcattcgattgaagtccgtataaatgccgaaaaaatccccagcttcgccccgtgcccaggaaaaattacagcctatcatgcccctgggggc

SEQ ID NO: 319534 - DNA, 1159 bp, Unknown
  Bacterial polypeptide expressing nucleotide sequence isolated from the Sargasso Sea
aatgttcaaaaaaattcttgttgcaaacagaggtgagatagctgttagagttataagagcttgtaaagaatggggtatacaaacagttgctattcattctgatgttgatagaaacagcatgcacgttcgattagctgatgaaagcatttgtgtaggacctcatcaagccgcaagtagctatttaaatattccagctattatgtcggctatagaattaacgaattctgaagctgttcatccaggttatggttttttatctgaaaattatgaatttgcaaaaatccttgaagagaacaaaattaaattcattggtccatcatcttcgttaattaaaatgatgggtgataaaattgaagcaaaaaaaattgcaaaaaaatatggtcttcctgtaattgaaggatctgatggaagtgtatcagattttaacgaagcaaaaaaaatatgcaaagaaatcggatatccagttctgattaaagctgctggtggtggtggaggaaaaggaatgaaggttgtcaaaaaagaagatgaatttgaaagcctatttttaactgctaaaactgaggcaaaaaaattttttggtaatgatgaggtttatattgagaaattttttcaaaatccaagacatatcgaagttcaaatattatctggcaaaaatagaactgtacatcttcatgaaagagattgttctattcaaagaaggcatcaaaaattaattgaagagactcctagtcctttactaaatgataaaataagaaatgatctttttgataaaaccgtaaaaatggtaagccaaattggatatgaaggcgcaggtacagtagaatttatttttgaggatggaaaattttattttttagagatgaacacaagaatacaagtagaacatccagtgactgaagttgtgactggaatagatttaataaaagaacagatctggattgcatatgatggtaacacagctttaaaacaggaagatattaagccaagaggtcacgctattgagtgtagaataaatgcagaggacgtgagtaaaaattttcagccctcgcccggggaaattactatgtgtcatcaaccttcgggttttagaacaagggtagatggggctatatttcaaggctataaagtaactccatattatgacagcatgattttgtaa

SEQ ID NO: 319535 - DNA, 972 bp, Unknown
  Bacterial polypeptide expressing nucleotide sequence isolated from the Sargasso Sea
tatgtttaagaaaattctagtagcgaatcgtggagaaattgctttacgagtaattagaacttgtaaagaaatgggcattaaaacagtagctgtctattcaaaagctgatgaggaaagtttacatgttagatttgctgatgaggcagtttgcattggaccagcgcctagctcagaatcctatctaaaaatccccaatatcatagcagcggcagaaataacaaatgcagatgcaattcatcctggatatggtttcttatctgaaaatgctaagttttcaaagatatgtggagaacataaaataaaatttattggcccatctccagaaatgattgaaaaaatgggagataaggctactgctgtttcaacaatgaatctagcaaaagttcctacaataccaggttctggtggtgcagttgaaaatgaagatgaagcattaaaaatagcatctaaaattggttatccagttatggtaaaagcttctgctggtggaggtggaaagggaatgagagccgtatggaataaggctgatttcaagaaaaattggtctagtgcaaagcaagaggcttcagcagcatttggtaatgatgatatgtacatagaaaaattgattcaggaaccaagacatatagaaattcaaataattgcagatcagtttggtaatgtctgtcacctttctgaaagggattgttcaatccagcgccgtcatcagaaacttacagaagagactccatctccctttatgacttcaaaattaagagataaaatgggtaaagctgcagttaaagctgctaaatttattaattatgaaggtgttggtacagttgagtttttagtagataaggaccgaaatttttattttatggaaatgaatactaggattcaagttgaacatccaattactgaacaagtaatagattatgatttaattaaagagcaaattaaagtagcggcgggtgttaaggtttcgggcaa

SEQ ID NO: 319536 - DNA, 675 bp, Unknown
  Bacterial polypeptide expressing nucleotide sequence isolated from the Sargasso Sea
tatggatttcttagattttgaaaaaccaattgtagagcttgaaagaagaatcgaagagctcagattgactaatacagatgcagacaccgcaatcgagctagatgacgagattgagaggcttcagaaaaagtgcgagtctctgacaaaaaaaatctttgggaatctcaatgaatggcaaattgctcaactggcaagacatccacttagacctaaatccattcaagtgattgatgccatcagcgaggactttcaagagcttcacggagatagaatgtatgcggatgattccgcaattatttcagggcttgccaaaatcaataaccaatcagtgatgtttattgcacaagaaaagggcagtaataccaatgagaaaatgaaaagaaatttcggtatgcctagacctgaaggttaccgaaaggcacaaagaatgatgaagctcgcagaaaaattcaaaattcccattgtcaccatcatcgacacacccggagcatttcctggaattggagctgaagaaagaggtcaaagcgaagcaattgcaagaaaccttttcactctggcatctttaaaaactcccattattaatcttgtacttggagagggaggttcaggtggcgcattggcgattggcatgggagataaactcatcatgcttgaatactcaatttattctgtgat

SEQ ID NO: 319537 - DNA, 693 bp, Unknown
  Bacterial polypeptide expressing nucleotide sequence isolated from the Sargasso Sea
aagtaaaggaatattttgagattttgtttgatgatggatttaaagaattaaacccaaatatgtcatcaattgatttccttaaatttaaagatcaaaaaaaatattcagataggttaaaagaagcaacaaataaaactaaattaaaagattcaattagagttgggtatgggaagtcttttggcaaaaaccttgtaattgcttgtatggattttaaatttattggtggttcaatggggtctgtagtaggtgaaaaaatatcagaagcaataacttttgcaattaaaaataattacccccttttaattatttcaaaatcaggtggtgctagaatgatggaatctgcaacatctcttatgcaaatggctaaaacatctgcaagacttaatgatctttcagaagctggattaccatatatctctttatgtacagatccaactacaggaggaactactgcctcttttgctatgctaggagatattaacattgcagaaccaagggcacttattgcttttgctggtcctagggtagttaaagacacaacaggtaaagatttaccagaaggatttcaaaaaagtgaatttttattagagaaaggatttcttgattttattgctcatcgaaaagaattaaagaaaaaaattaatctttacatagatctaattcaaaattctccccttcgtaaatatgaataaa

SEQ ID NO: 319538 - DNA, 869 bp, Unknown
  Bacterial polypeptide expressing nucleotide sequence isolated from the Sargasso Sea
aaagttgcttgacacacaacttgctgaatgcatagagttaggtgaaaagtcagatatagatgtctctgaaacctgctctcagattcgatcaagattaaaatcaactataagggagatttatggaaatttaaccccttggcaaaaagttcaaatttcaagacatccagacagaccttacacccttgattacataaataatatactaggtgattcatttttggaattacacggagatagaaattttaaagacgataaagctatgattggcggtttgggaaaaattggagatcaatcatttatgtttatcggtcaacaaaagggtcataatacaaaagacagacaatatagaaacttcggaatggctaatccagagggatacaggaaagccttgagattaatgaagatggctgaaaagtataacataccagtagttactttaattgatacgccaggagcataccctgggctagaggcagaagaaagaggtcaaggagaagcaattgctagaaatattttagagatgactagattaaaagtccctataatcactgttattattggagaaggagcttctggcggtgcattaggtattggtgttggagatactgttcttatgttagaaaacacctggtattctgttatctccccagaatcatgctcttcaattttgtggagaagttgggaatataaagaaattgctgcatcagctctaaaattgactgctaaagacatgaaaaaaatgaatttagtagataaagttattaaagaaccagagggaggtgctcatagaaatcaattaaaaacatttgaagttgtaaaaaccaaatatattaacagcatacggagagctttccaaactttcgtctgag

SEQ ID NO: 319539 - DNA, 679 bp, Unknown
  Bacterial polypeptide expressing nucleotide sequence isolated from the Sargasso Sea
atggattggtttaaacgtaaagataaaaaaattaaagagaaaaataaaaaagccattccagatggtttatgggaaaaatgtccatcttgcagtgaaattttatttaaaccggaattagacaaaaatttatcagtctgccgccattgcaactatcatttccgtatgaattttcataattatattgatcttttaattgatgggggtagttttactcaactttttactgatataaaatctagtaattttcttcattttactgcgaaaagaaattataatgaccaattaaaggatgcttatgaaaaatcagggattactgatgcaatagagatttataaaggaaagattaaagaaaaatctgtaataatgggtataatgaactttgactttataggtggtagtatgggttctgttgttggagaagctgtttcaagagcaatagtatatgctagacaaaaaaaaataccattaatcataatctgtaaatctggcggtgctaggatgcaagaaggtgcaatttcacttatgcaattagctaaaacaagttctcagttagcaaaattctcaaatgatggaggactttatatatcgatattaaccgatccgactactggtggagtgactgctagctatggaatgctaggagatattattttagcagagcccggtgcattgataggat

SEQ ID NO: 319540 - DNA, 554 bp, Unknown
  Bacterial polypeptide expressing nucleotide sequence isolated from the Sargasso Sea
aatgagctggttagataaaatattgccttcaagaattcgtgccactaaagatgataaaggttcagtccctgaaggactatggcataagtgcagtaattgcggtgctgtactctatactgctgaatttgataaaaattcccatgtttgtccaaaatgtaatcatcatgagaggatatcggcgagaaaaagagtaaacatttttcttgataacggtgatcatgaagaaatgtttaataatctctctccaagagatatgctcaattttaaagataaacaaaagtatcaagataaattcaaacagtctcaagagaaaacaggtgaaaaagacgcgcttttagtgtttaaaggaaacctaaaaaacatacctgtgatagtttgtgcctttgaatactctttttttggaggatcaatggggtctgttgtcggtgaaaagtttattagagcagtaaagctgtctatcgaattaaatagaccattaatatgtttctctgcaagtggtggagcaagaatgcaagaatcattgttctcattatttcaaatgtctaaaacaagtg

SEQ ID NO: 319541 - DNA, 526 bp, Unknown
  Bacterial polypeptide expressing nucleotide sequence isolated from the Sargasso Sea
ctcacgttcatcgatacccccggggcctatgccggccttgaggccgaagagcagggccagggcgaagcgatcgccgtcaacttgcgggagatgttccgattgcgcgttccggtgatcgccaccgtgatcggtgaaggtggatccggcggtgccttgggcatcggggtggccgatcgcttgctgatgttcgagcacagcgtctatacggtggctagccctgaggcctgcgcctccatcctctggcgtgatgcggccaaagcgcctgatgcggcggcagccttgcggatcaccggccgggatctgctggagcttggggtggtggatgaggtgctcgaggagccctccggtggcaacaactgggcaccattggaggctggagaaaacctgcgggcggcaatcgagcgtcacctcgatcaactgctgagcctttcggaacatcaactgcgcgaggcccgttactccaaattcagggccatggggcggttcctcgaaaaaacgtcacaggatgtcgacaaagccgcttaaa

SEQ ID NO: 319542 - DNA, 649 bp, Unknown
  Bacterial polypeptide expressing nucleotide sequence isolated from the Sargasso Sea
tatggtgggagctttcaagagcttgcaactaaaattatcacaaaagatattttaaagtttaaagatacaaagtcttatggacaacgtattaaagaagcagcaacaaccactggcgaagaagaggcaattattataggtaaaggaaaacttgagggtgcagaaattgtagttgccgcttttgaatttcgttacatgggtggttctatgggcggagcagttggaacaaaatttgtacaaggagttgacgaggctattgcaaacaaagtcccttttatatgtttttccacaagcggtggagctagaatgcaagagtcaatggtttcacttatgcagatggctaaaacttcagcagcattagaaaaacttaaagaagcaaaattaccatatatatctgtgatgattgatccaatatatggaggtgtttcagctagcatagccatgttaggagacattaatatagcagaacctgatgcattggttggttttgcaggtagacgagtaattgagcaaactgttagagttgatctacctaaggactttcaaaaatctgaatttttattagagcatggagcgattgatatgatagttcatagacatgacttaagattgaagatctccagcattttatccaagctgtatcctcaataat

SEQ ID NO: 319543 - DNA, 580 bp, Unknown
  Bacterial polypeptide expressing nucleotide sequence isolated from the Sargasso Sea
aaaccttatgcaaaacgaatcgtatctgaacaaaaacggactggcttgtctgacgctgccctgactggaacagggatgattcgtgcacggcgtgtagcctgcggtgtcactgattcctcatttatcatgggcagcatgggaagtgtcgttggcgaaagactggcgaggctcgttgaacgcgcaactactgaatctctccctctcatcataataagtgcttccggtggaggggcccgaatgcatgaaggaatactatctctcatgcaaatggcaaaagtgtcggctgcactggctcgttattccgagtctggtgggttgtttatctcagtacttacaaatccaacaatgggtggtgtggctgccagttttgcctctcttggagatctcgtatttgccgagccgagagcactcatcgggtttgccggaccaaggacaattaaagcgactatacgagttgaacttccagcagggtttcaaactagtgaattcttgctggagcatggcttcattgatcgaatcatttgtcgccagaatctcaaaagtgaaattgcacgagccattgactactgtggtggttgaa

SEQ ID NO: 319544 - DNA, 543 bp, Unknown
  Bacterial polypeptide expressing nucleotide sequence isolated from the Sargasso Sea
aaactgtaaccgacgatgctgttgtgatctctcagggtaatcttggcagtattccagttacgtgcatagttcaagactttgcatttatgggtggatcacttggtgttgctgcaggggaagcaataattaaggcaatggatgaggcgcttcgtttatcctcgcccgtcatactattttctgcagcaggtggcgcgagaatgcaagagggtattctgtcactcatgcagatgccgagaacgacaatagctgttcaaaaacttaatgaagcaaggataccatatatcgttgttcttactaatccgacaactggaggtgtaacagcatcatacgcaatgttgggcgatatccatatagctgaacctggtgctttaataggcttcgcagggccaagagttatagaacaaacaattaaagaaaaattacccgagggttttcagagatctgaatatctcttggagcacggtatgattgatatggtagtgcacaggcatgatctcaggagcaagcttattactatttgtaaacaccttctcaataaataat

SEQ ID NO: 319545 - DNA, 434 bp, Unknown
  Bacterial polypeptide expressing nucleotide sequence isolated from the Sargasso Sea
agccgtaggcggtgcaatcgtaaaaggcgctaagatagccgtagaaaaaaaacttccattcataatatttactgcttctggtggtgcgcgaatgcaagaaggaataataagcttaatgcaaatgccaagaaccgttgctgccgttgatctattaaaccaaaatcaaataccatatattgtcgttttaacggaaccaactacaggaggtgtaaccgcatcatttgctatgttaggtgatattacactagctgaaaaaggttcaaccattggttttgcaggaaaaagggttatccaagatacaattagagaagaattgccaatagattttcaaaaagctgaatatttaaaagaacacggtatgattgatattgtgtgtcatagaaaagatttaaaaaacactctcaataaaatattaattcatattcactcataaa

SEQ ID NO: 319546 - DNA, 835 bp, Unknown
  Bacterial polypeptide expressing nucleotide sequence isolated from the Sargasso Sea
tatggcttggtttaaaagaaaagataaaaatctaaaagattcagataaaaaagtaattccagatggtttgtgggataagtgtccatcctgtaatgagatcatatatcgtccggaacttgaaaaaaaactttcggtgtgccatcattgtaatcatcattttcgcgtttctcctgcattatatgttgaattacttttagataaagggacttcaacaaggcattttcagaatattgtaccccatgactttttaggatttaacgcgaataaggcttataaagatcagataatagaagcaataactaaaactggagaaagtgatgctgtaaatgtttatgatggaaatatcaatgaccaccaagttgttttaggggtaatgaattttaaatttatcggcggcagtatggggtcagtggtcggtgagatagtagcaagggccttaatcatggctggagaaaaaaatgtaccttttatattaatttgctcatctggtggtgcgcgaatgcaggaaggtgctatttcactaatgcaactagcaaagaccagtactcgattagcaaaattttctaatgatggagggcttttcataccaattctaaccgatccaactacaggtggagttacagcaagctatggtatgttaggtgatgtgattttagcagagcccggagccttgataggattcgctggtcctagagtgattaaacaaactattgggcaggatttacccaagggatttcaacgatctgaattccttcttgaaaaaggttttattgattgtatagttgatcgaagcaacatgaaagagaaactctcaactttaaatttcattctttaa

SEQ ID NO: 319547 - DNA, 724 bp, Unknown
  Bacterial polypeptide expressing nucleotide sequence isolated from the Sargasso Sea
aatggaaaaccaatatgtgactccaaaagatagttatcatgttagaatcggttctaaagagtattttgaaattatttttgatgaaaataaaattgaatacatagctgatgatttaaagccaaaagacaagttaaaatttgaggacaaaaagaaatattctgatagaattgtagctactcagaaaaaaactgggttaaatgattctatgcgtgctgcatatggtacaacttcaggtcatcctatagttgttgcttgcatggatttttcatttattggaggttcaatgggaaatgtaatgggtgaaaaaatagctaggtcagttgaaatggcaattgaaaaaaaatgtccatttatgttaatttcaaaatctggaggagctagaatgatggaagcaggtatatcattaatgcaaatggcaaaagcttcggctaaattaactcaactttcggctgaaaaactgccctatatttcttatttaacagaccctacaacggggggagttactgcatcatttgctatgttaggagacttaaatatttctgaacctggggcactaattggttttgctggacctagagttattaaagaaacaattggtagagaccttcctgaaggttttcaaacaagtgaatttttattagaaaaaggttttttagattttatagttgatagaagaaatcttaaaaataaattatctcaactaatagaaatgtttaaaaattag

SEQ ID NO: 319548 - DNA, 448 bp, Unknown
  Bacterial polypeptide expressing nucleotide sequence isolated from the Sargasso Sea
cttgggaggggcagttggaacaaaattcgtaaaaggagttgatgaagcaattgcaagtaaagttccttttgtatgtttttctacaagcggtggagccagaatgcaagagtcaatggtctcattgatgcaaatggctaaaacttcggcagcattggaaaaactgaaagaagtaaaattaccatatatatctgtaatgattgatcctatttatggtggagtttcagctagtatagctatgcttggagatatcaatatagcagaaccaaatgctttggttggttttgcaggcaggcgtgtgattgagcagactgtaagggttgatctacctgaggattttcaaaaatcagaatttttattagagcatggagccattgacatgatagtacacagaaaagatttaagatcgaaggtttctagcattctatcaaagctgtatcctcaacaatga

SEQ ID NO: 319549 - DNA, 494 bp, Unknown
  Bacterial polypeptide expressing nucleotide sequence isolated from the Sargasso Sea
cattatcacctttatcgacacgcctggtgcatacccaggtgtgggcgctgaagaacgtggtcaaagtgaagctatagcccgtaacctgaaagtgatggcaggcctgaaagtgccggtgctctgtactgtgataggcgagggtggttctggtggtgctttagccattggcgtcggcgatcaggtcaatatgctgcaatacagcacctattcggtgatttcacctgaaggttgtgcttctattttgtggaaaagcgctgataaagcccctattgctgccgatgccatgggcattactgcaccgcgtttaaaagaactgaacctgattgacgacatcgtcagtgagcctttaggtggagcacaccgcaatcacgagcaaatggcgcaaagtttaaagcaggcgttattgcgtgatttggccaagctggaaaaactcagccttgaagaattgctggacagacggtataagcgtttaatgtcttttggctactgctaat

SEQ ID NO: 319550 - DNA, 647 bp, Unknown
  Bacterial polypeptide expressing nucleotide sequence isolated from the Sargasso Sea
acaacaaaaaggtagagatacaaaagagaatgttgcaagaaatttcggcatggcaaagcctggaggctataggaaggctctaaggcttatggatcatgcagatcgctttaacttgccaataatctgttttatagatactcctggcgcttatgcggggctcatagcggaagaacaaggccagggagaggcaatcgcagtgaatttgcgagaaatgtttaggcttaaagttcccataattgcaactgtcattggagagggtggctctgggggcgctcttggtataggtgtcgcagataggttgcttatgtttgaacatagtgtttacacagttgcaagccctgaagcttgtgcttcgattttatggagggatgctggtaaggctcctgaggcagcatcagcattaaagattactggccctgaccttatgaagttaggaattgttgatgaggttctaaaagagccttctggggggaataattgggctccgcttcaggctggagatactttgaaaaatgctcttgagaagcatttatccgaattattagctttatccactactgaattgagggacaatagatattccaaatttagaaaaatgggaaaatatttggaatctcagtctatcgaaagtgaaatttcagtttaaa

SEQ ID NO: 319551 - DNA, 507 bp, Unknown
  Bacterial polypeptide expressing nucleotide sequence isolated from the Sargasso Sea
ttttaggagaagttgaaaaaagaaaagtcatattatgtattatgaattttaaattcattggcggaagtatgggcagtgctgtgggagaaaaaatttcaaaagcaatcagtttggcaagtgagaaaaactgtccaataataattttatgtcaatctggaggagctagaatgcaagaaggagcattatccttaatgcaattatctaaaattagtactcatcttgcgaaattttcaaagaagggtggattgtatatttcaatattaacttaccctactactggcggtgttacagctagctttggaatgcaagcagatgtaacaatagctgaaccaaaagctttaattgggtttgctggacaaagagttattaagcaaactactagtcaagaattacctgatcattttcaaacatctgagtttttaaaagagaaaggttttattgattttgttgttgatagaaagaatttaaaaaatagtatttctaaggttttggatattttggcatgaa

SEQ ID NO: 319552 - DNA, 293 bp, Unknown
  Bacterial polypeptide expressing nucleotide sequence isolated from the Sargasso Sea
attgggggggattggttcaataaataataggccagtgttgatgttagggcatcagaaaggaagggacacaaaagaaaatgtagtaagaaactttgggatggcaaaaccaggaggttacagaaaagctcttagattaatgcagcacgcaaatagattctctttgccaatccttacatttattgatactcctggagcttatgctggtttaaagctgaagaacaggtcaaggggaagcgattgcagaaaccttagagagatgtttggattgaaagtcccattgtggctactgttat

SEQ ID NO: 319553 - DNA, 652 bp, Unknown
  Bacterial polypeptide expressing nucleotide sequence isolated from the Sargasso Sea
atggcttggttcaaacgaaaagacaagaaattaaaagatccagaaaagaagtcgataccggatggtttgtgggataaatgcccctcatgtaacgaaataatttatagacccgagcttgagaaaaagctctctgtttgtcatcattgcaatcaccactttagagttcttcctgatacttatgttagcttactactagacgaaggtacatttaaaagttactttgatgatttaatgccaaaagactttttggattttaaggcaaataaaggttaccaagatcagataaacgcagcaaaaacaaaaactggtgaaaatgatgcaattcgtgtgtatgagggtaaaatgaatggtaatgacgttattttatcaataatgaacttttcatttattggtggtagcatgggttcagtagttggagaagctgtatctagggccatagtaatggcaggagaaaaaaaattgccttttattttaatttgttcatcaggcggcgcaaggatgcaagagggcgctatatcgctaatgcaattggcaaaaaccagcactcaattagcaaaattttcaaaaaatggaggtctctttattcctattttaacagacccaactactggaggagttactgcaagctttggaatgcttggagatgtgattc

SEQ ID NO: 319554 - DNA, 910 bp, Unknown
  Bacterial polypeptide expressing nucleotide sequence isolated from the Sargasso Sea
agaattgaagagctcagattgaccaatacggatgcagacactgcaatcgagctagatgatgagattgagaggcttcagaaaaagtgtgagtctttgacaaaaaaaatctttggtagtctgagtgaatggcaaattgctcaactggcaagacatccacttagacctaaatccattcaagtgattgatgccatcagcgaggattttcaagagcttcatggcgatagaatgtatgcagatgattctgcaattatttcagggcttgccaaaatcaataaccaatcagtgatgtttattgcacaagaaaagggcagtaacaccaatgagaaaatgaaaagaaattttggtatgcctagacctgaaggttaccgcaaggcacaaagaatgatgaagctcgcagaaaaattcaaaattcccattgtcaccattatcgacacacccggagcatttcctggaatcggcgctgaagaaagaggtcaaagcgaagcaattgcaagaaaccttttcactctggcatctttaaaaactcccattattaatcttgtactcggagagggaggatcaggtggtgcattggcgattggcatgggagataaactcatcatgcttgaatactcaatttattctgtgatctctccagaagcatgttcatccatcttatggaggacgcccaatgagacggaaactgctgctgaagcaatgggaatttcatcttctcgattgaacaaattgggactggtagatgagatcattgatgaaccgcttggaggatttcataggaatccagagaaaactttcacatcaatcaaagaaagtattgctaatgcacttcaagccctcaaatcagaagatccagagaccttacttgatcaaagaagagcaagatataaggcaattggcgaattcaatgaaa

SEQ ID NO: 319555 - DNA, 384 bp, Unknown
  Bacterial polypeptide expressing nucleotide sequence isolated from the Sargasso Sea
aaaattgtccaataataattttatgtcaatctgggggagctagaatgcaagaaggagcattgtctttgatgcagttatctaaaattagtactcatcttgcaaagttttcaaaaaaaggtggattatatatttcaatattaacttaccccacaactggcggtgttacagctagctttggaatgcaagcagatgtgacaatagctgaaccaaaagctttaattggttttgctggacaaagagtcattaagcaaacaactagtcaagaattaccagatcattttcaaacatctgagtttttgaaaaaaaaaggttttatcgattttgttgttgacagaaaaaatttaaaaaatagtatttctaaggtattggatgttttagcatgaa

SEQ ID NO: 319556 - DNA, 607 bp, Unknown
  Bacterial polypeptide expressing nucleotide sequence isolated from the Sargasso Sea
atggcttggttcaaaagaaaaagtaaaaagattcagacttcaacagaagagaaaaaagatatccctgcaggtctatggtataaaactcctacaggtgaaattattgatacaaaagaacttactgataatcaatatgttagccctgaagatgattaccatgtgcatattggtagtcaagagtattttgaaattttatttgataataataaatttactgaaatagattctaaagtaaaccccgttgattttttaaattttatcgatacaaagaaatattctgatagaataaaagaggctcaaagtaaaacaggccttaaagatgctattagagttggatatggaaaatcttatggaaaagaaattgtaatagcatgtatggactttaaatttattggagggtccatgggatcagttgttggtgaaaaaattgtaagagcaattgactattctattaaaaaaaaggctcctttattgattatctctaagtcaggaggtgcaagaatgatggagtcagcgacttcactgatgcaaatggctaaaacagcagcaaaactgaatgaattgtcagagtctaagataccttatgtatctctctgtactgacccta

SEQ ID NO: 319557 - DNA, 820 bp, Unknown
  Bacterial polypeptide expressing nucleotide sequence isolated from the Sargasso Sea
acaaaaaaaatctttggcagtctcagtgaatggcaaattgctcaactggcaagacatccacttagacctaaatccattcaagtgattgatgccatcagtgaagactttcaagagcttcatggcgatagaatgtatgcagatgattccgcaattatttcagggcttgccaaaatcaataaccaatcagtgatgtttattgcacaagaaaagggcggtaacaccaatgagaaaatgaaaagaaatttcggcatgcccagacctgaaggttaccgaaaggcacaaagaatgatgaagctcgcagaaaaattcaaaattcccattgtaaccatcatcgacacacccggagcatttccaggaattggggctgaagaaagaggccaaagcgaagcaattgcaagaaaccttttcactctggcatctttaaaaactcccattattaatcttgttctcggagagggaggatcaggtggcgcattggcgattggcatgggagataaactcatcatgcttgagtactcaatttattctgtgatctctccagaagcatgttcatccatcttgtggaggacgcccaatgagacggaaactgctgctgaagcaatgggaatttcatcttctcgattgaacaaattgggactggtagatgagatcattgatgaaccgcttggaggatttcataggaatccagagaaaactttcacatcaatcaaagaaagtattgctaatgcacttcaaacccttaaatcagaagatccagagaccttacttgatcaaagaagagcaagatataaggcaattggcgaattcaatgaaaactgat

SEQ ID NO: 319558 - DNA, 766 bp, Unknown
  Bacterial polypeptide expressing nucleotide sequence isolated from the Sargasso Sea
caccatatgccaatatcgccacgcgctcgtttcaaaaatctgttcgatggaggcgtttttgttgaaatagatgtcccaaaaccaattatagatccgctgcaatttaaagatcaaaaaaaatatccagataggatgaaagcagcgcagaaaaagagctctgaaaaagaagcaatgttagttgcagaaggagagattggtagaactccaatagtggcagccgctcaagatttctcttttatgggcggttcaatgggtatgtatgtaggtaacgcaataattactgctgcccagcgggctgttgaattaaatcgcccattgatactcttctcggcagcaggcggcgcccgaatgcaagaaggaatattgagcctgatgcaaatgcccagaacaactgttgcaatacaattattgaaagaagcaaaactaccatatatcgtgattcttactcatccaactaccggcggggtaaccgcatcttatgcaatgttaggtgacgttcagatttctgagccgaacgcgctaatttgttttgctgggccgagagtaatcgaacaaaccattcgagaaaaactgccagaaggttttcaaagagctgaatatctgctcgatcacgggatgctcgacctagtaacgcctcgaacggaaataagaaatacactaattaaaattacgcgaatacttcttggtcttggtccagtagtagtaggagacctaccgaaaccttcacaggatagttcctcggaagaaatcgaagaaaaaatctaaa

SEQ ID NO: 319559 - DNA, 658 bp, Unknown
  Bacterial polypeptide expressing nucleotide sequence isolated from the Sargasso Sea
catcgatttattatttgatgaaggtagtgctaagcagcttttttctgatttgaaatctagaaattttcttgaattttatgcgaagcaagattacggagaccaattaaaagatgcatatgaaaaatcaggcattactgatgcaatagaaatatttacagggaaaatatatgaacagcccgtcataatgggtgtaatgaattttgaatttattggcggaagtatgggatctgttgttggtgaagctgtatccagagcaatagtatatgctagaaaaaataaattacctctgattataatttgcaaatctggaggagcaagaatgcaagaaggggcaatttctcttatgcagctagctaaaacgagtgcgcagttagcaaaattttcaaatgatggaggattatatatatcaatattaacagatcccactactggtggtgttaccgctagctttggtatgctaggagatattattttagcagaacctggtgctttgattggatttgctggtccaagagtaatcaaacagacaattgggcaagatctgccaaagggttttcagcgttctgaatttttaaaggaaaaaggttttattgatcaaatagtatctagacataaaatgaaagataagctttacagcataataaatatattaaattga

SEQ ID NO: 319560 - DNA, 523 bp, Unknown
  Bacterial polypeptide expressing nucleotide sequence isolated from the Sargasso Sea
aatgaaaatggcggaacgttttaatttacctatcattacctttatcgataccccgggtgcataccctggcgtaggcgctgaagagcgtgggcaaagcgaagctattgcaaagaatctttttgaaatggcagagcttactgtgcctatcgtctgtaccgttattggtgaaggcggctctggtggtgcattagccattggtgtgggcgatagagtaaatatgcttcaatattccacctactctgttatctcacctgaagggtgtgcttctatcttgtggaaaagtgcagagaaagcgccgctagccgcagaggcaatgggtgttagtgctccgcaaattaaagagctcgggctgattaacagtattgttgaggagcctttgggcggtgctcatcgagaccacaacagcatggctgccaatttaaaagcggtactgaagcagcagctgagtcaacttaaagagctagacaaagacaaacttcttgaagagcgttatcagcgactcatgtcgtttggctactgctaa

SEQ ID NO: 319561 - DNA, 616 bp, Unknown
  Bacterial polypeptide expressing nucleotide sequence isolated from the Sargasso Sea
tcttaaatttgaggatcaaaaaaaatattccgatagattaaaagatgctcaaagtaagacaaaattaaaagaagcaattagaattggttatggtaagtctttcggaaaaaatattttaatagcttgtatggactttaactttattggaggatcaatgggatcagttgttggagaaaaaatatctcttgcaatagactatgcaataaaatataaatgtccacttgttataatttcaaaatctggaggagcaaggatgatggaatctgcaacttctttaatgcaaatggctaagacatctgcaaaacttaatgatttatcagaatctaaattaccatatatttctctatgtaccgatcctacaacaggtggaacaactgcttcattcgcaatgttaggagatataaacattgctgaaccaaatgcactaatagcttttgctggtcctagagtagttaaagatactacaggtcaagatttaccagatgggtttcaaaagagtgaatttttattagaaaaaggatttttagatttcatttctcacagaaaagatcttaagaagagaatcaatctttatatagatttaatagagaatttaccattacgcaattatgaataa

SEQ ID NO: 319562 - DNA, 349 bp, Unknown
  Bacterial polypeptide expressing nucleotide sequence isolated from the Sargasso Sea
tgctattcaatcattaagagaagcaaaattaccctatattgtagtcttaacaaatcccactactggaggtgttactgcctcctatgcaatgctaggagatataacaattgcagaaccaaacgcacttatatgttttgctggtcccagagtaatagaacaaacaattggcgaaaaattacctgatggttttcagaaatctgaatatttacttgatcatggtatgattgatatggttactagtagggacaaaataagggatgaacttatacttttattacatatacttatgaaaaaacctcgtgctatcagaggtaatattaaaaaagatatagacaaaatcaattcttga

SEQ ID NO: 319563 - DNA, 718 bp, Unknown
  Bacterial polypeptide expressing nucleotide sequence isolated from the Sargasso Sea
agataattttcatataagaattggatcacttgaatatttcaaaattctatttgataacaataaatatgaagttttgtttgataatttaattagtgcagacccattaaaatttgttgatactaaatcatacccaaaacgtgttaaagatgctcaaaagaaaaccggtctaaatgatgctattaaggtggcatacggaaaatcatttggaaaaaaacttaccatagcatcaatggactttacatacataggtggctctatgggctccgttgttggagaaaaaatatcaagagctattgatcatgcaattaaagaaaaaactcccctggtaataatttcaaaatcgggtggagcaagaatgatggaaggtgcaatttctttaatgcaaatggcaaaaacatctgccaagttaacacagttatcaaaaaataagctaccatatatttctttatgtactgatcccaccacaggaggaacaactgcatcattcgctatgcttggtgatattataatttccgagccaggcgcactaattggttttgctggaccaagggtggttaaagatactacaggacaagacctgccagaaggttttcagagatcagagtttttgttagataatggttttatagattttataagccatagaaatgatttaaaaaagaatatcaatttatatattgatttgatattaaatacccctctgagagcttacaattaa

SEQ ID NO: 319564 - DNA, 295 bp, Unknown
  Bacterial polypeptide expressing nucleotide sequence isolated from the Sargasso Sea
gaaaatgatgcttttgttgttatccgtggaagagtttatggcgagcaagttgtttgtggagcctttgaatttggatttttaggtggctctatgggttctgttgttggtgagaaaattgttcttgccgttgaagatgctattgctcataagtgccctcttgtaatttttacagcaagtggtggagcaagaatgccagaaagcttgttttcacttatgcaaatggctaaaacttcggcagctttaggtaaattaaaagatgccggcttgccatatatagttgtgttaacagatccta

SEQ ID NO: 319565 - DNA, 718 bp, Unknown
  Bacterial polypeptide expressing nucleotide sequence isolated from the Sargasso Sea
gataattttcacttaagaattggatcaattgaatatttcaaaattctttttgataacaatgaatatgaagttttgtttgataatttgattagtgcggatccattaaaatttgttgatactaaatcatacccaaaacgtgttaaagatgctcaaaagaaaactggtcttaatgaagctattaaagtagcatatggaaaatcttttggaaaaaaacttaccatagcatcaatggactttacgtacattggtggatcaatgggctcggttgttggagaaaaaatatcaagagctattgatcatgcaattaaagaaaaaactccgctggtaataatttcaaaatcaggtggagcaagaatgatggaaggtgcaatttctttaatgcaaatggcaaaaacatctgccaagttaacacagttatcaaaaaataagctaccatatatttctttatgtactgatcccactacaggtggaacaactgcatcattcgctatgcttggtgatattataatttccgagccaggcgcactaattggttttgctggacctagggtggttaaagatactacaggacaagaccttccagacggatttcaaagatctgagtttttgttagataatggttttatagattttataagccatagaaatgatttaaagaagaacatcaatttatacattgatttaatattaaacacacctctgagagcctacaattaaa

SEQ ID NO: 319566 - DNA, 270 bp, Unknown
  Bacterial polypeptide expressing nucleotide sequence isolated from the Sargasso Sea
catgaaaacaaccttcctggagttcgagcagccgatcgcagaacttgaggcgaagatcgaagaacttcgcttcgtacaagacgattccgctgtcgacatttctgaagaaatttcccgcctggcttccaagagccagcagctcaccaaagatctgtacgccaacctgacgccatggcaggtcgcgcagatcgcccggcacccgcagcgtccgtacacgctcgattacgtccgcgaaatctttaccgacttccacgaactgcacggcgaccg

SEQ ID NO: 319567 - DNA, 304 bp, Unknown
  Bacterial polypeptide expressing nucleotide sequence isolated from the Sargasso Sea
gatgaaaagacattatttaccatttgaaaaaccgttaaaagatttagattttgaaattgaaaaattgacaacatccgaatctgattcaaaacaattaaaagatttaattgctgaaagggaaaatttggaaaaagaaatttttacagatttatctccttgggagactgtccaactagccagacatcctaatagaccttatacccttgattacatcaatgcttggtgtgataatttcacagaattacatggagacaaagctttttcagatgacaacgcagttatagcaggaattggaatcatcgac

SEQ ID NO: 319568 - DNA, 706 bp, Unknown
  Bacterial polypeptide expressing nucleotide sequence isolated from the Sargasso Sea
tatgtcaatattagattggtttgaaaaacgagaaaaaaaaataaaaaacaccggtagattagagataccgggtgatttatggttgaaatgccctacgtgttcagacgttatatttaagaaagatttagagttaaattttatggtttgtccaagttgtgaacatcattttcgaattatacctaagcagcgtttggattatttttttgatacaggatcgtttgaggagatggatgctttattagagcctactgattttttaggctttgtagatacacagccttatgaaaaacgtataaaatctgctaaaaagaaatcagaaaaaagtgaagccataacaactgggactgctttgttgaataataagaaagttaatgttggcattatggatttttcttatatgggaggctcaatggggtctgtagttggtgaaaaagtgactaggcttattgaaaagtctattgaagaccggtctccgttaattttatttacaatgtcaggtggggctcgaatgcaggaggggattgtgagtttgatgcaaatggctaagacgtcagctgcgttatcacgattgtcagaagagagaattttgtttatttcagttttatgtgaccctactacgggaggtacttcagctagttttgctatgttaggtgatgttcagatagctgagcctggagcactaatttcttttgcaggacctagggtt

SEQ ID NO: 319569 - DNA, 326 bp, Unknown
  Bacterial polypeptide expressing nucleotide sequence isolated from the Sargasso Sea
aatgaaagaatacaatccaaactacctagactttgaacaaccactgcttgaaattgaagcaaaaattaagcaattaaaaaatgatcctgaaaaaactgctaaaagtgaagcttcgattactaagcttgaaaaggactatgtagaacaaactaataaaatatttaatggattgactgactggcaaatatcccaactagcccgccatcctcttagaccatatactctagattatatacctaatttattctcatcatttgatgagcttcatggtgacagaatgtttggtgatgatccggcgattatagctggaatggctaagattgata

SEQ ID NO: 319570 - DNA, 549 bp, Unknown
  Bacterial polypeptide expressing nucleotide sequence isolated from the Sargasso Sea
gcaaggcgctgcgtctgatgaaattggcagaaaaattttcactgccggtgctcacctttattgacacacctggtgcacatgcaggggtcacggcagaagagcataaccaaagtgaagccatcgctaaaaatctttttgccatggctgagcttaagacgcccatcatctgtacggtgattggtgagggtggctcaggtggtgcgttggccattggcgtgggtgaccgtgtggcgatgctgcagcatgccatttattcggtgatttcgcctgagggctgtgcttccattttatggaaatcagccgaacatgcagccgaggcagctgaggccatgggtatcacagcgcagcgcttgcatgatttgaagctgattgaccatgtgattgatgagcctctgggtggtgcgcaccgtgacattactgcaacagccgagaatctaaaggcatggttacagccagaactgcgtgccttgcaatccatgtctgtggacgatttgttgcaaacaaggcaacagcgtttgttaagtattggcgttgataatccctcgtaat

SEQ ID NO: 319571 - DNA, 547 bp, Unknown
  Bacterial polypeptide expressing nucleotide sequence isolated from the Sargasso Sea
tatgggtcggactccagtagtaatagcagctcaagatttttcttttatgggcggttcaatgggtatgtatgttggcaacgcaattgttaaagctgcagagcgtgccgttgagcttaaacgtcccttgattctattttcagcagctggtggcgcacgaatgcaggaaggcattctaagtttaatgcaaatgcccagaacaactgtcgcaatacaattactcaaagaagctaaactaccctatattgtggttttaacacatccaactacaggaggagttaccgcctcttatgccatgcttggtgacattcatattgccgagccaaacgctttgatttgcttcgccggacctcgagtcatagagcaaactatccgagaaaaattaccagaaggatttcagcgagcagaatatctcttagaccatggcatgttagaccgtgttacttctagactggaaatgcgcgatgaattaattactattgtccgtatactcactaataattctccacaaataaagggtgatttaccttcaccgacgcaagaaacttaa

SEQ ID NO: 319572 - DNA, 625 bp, Unknown
  Bacterial polypeptide expressing nucleotide sequence isolated from the Sargasso Sea
catgagttggtttgaccgattgatccccccaaagatcaaggacgtggcctccgcggcgacccgaagaggcgtgcctcagggtctctggcgcaaatgcgatgactgtagcactgtactgtacagcgcagatctcgaccgcggtatgcaggtgtgcccgaaatgcggccatcatatgcgtctgggggcaagggcgcgccttaatggattttttgacgacggccggtttgaggagattggtgcgggactgcgtgcggtcgatgtattgaactttcgtgatgccaaacgttatcgcgatcgcctttcggaggcggggaagaccagtcaggagccagaggctttgctcgccgcgcggggcaagttgctggatatcccgatttcagcggctgcgtttgagtttgggtttatgggtgggtctatgggctcggtcgttggtgagaagtttgcgcgttgcgttgatgatgcggtcgaacaaggaaacccctttatctgttttagcgcgagtgggggtgcccggatgcaggaaggcctgttctcacttcttcagatggccaaaacaacagcagccctgaataaactgaaggacgcccgcctgccgttcgtttccgtcctgactgacccgacgatg

SEQ ID NO: 319573 - DNA, 819 bp, Unknown
  Bacterial polypeptide expressing nucleotide sequence isolated from the Sargasso Sea
caataatgacctctaagtctaaaagtaaggtgcctgatggactttggagctcttgcccttcttgtgaatcagttttgtatgctcctgatttagaaaaatcactttttgtttgtcctaaatgtgaccaccatcttcgaattggagctagaaaaagattagaaatttttctcgataatggtcactttgaagaaatagcagctgacataaaaactaaagattcccttaaattcaaagatacaaaaaattattcctcaagaatcaaagatgctgtttcaaatacaggagagaatgaagccattattattggtaaaggaacgcttgattcaatggatgttgttgtagctgcatttgaatttaggtttatgggcggctcaatgggaggagtcgtaggagaaaagtttgtacaaggagtaaatgaggctataaagtctcattgtccatttatctgcttttctacaagtggtggtgcaagaatgcaagagtcaatgatttctttaatgcaaatggcaaaaacttcagccgccttacaaaagcttaaggcagaaaaattaccctatatttctgtaatggttgatcctatttatggaggcgtttctgccagtttagcaatgcttggcgacataaacattgctgagcctgatgcattagttggttttgctggaagaagggttattgaacaaactgttagagtagatttgcctgatgatttccaaaaatcagagtttttgttaaaacatggtgcaattgatatgattgttcacagaagaaatattagaactaaagttcacggactactaaaaaaaatatataaagcttaat

SEQ ID NO: 319574 - DNA, 754 bp, Unknown
  Bacterial polypeptide expressing nucleotide sequence isolated from the Sargasso Sea
aataggaactcaagaattaactgagaataattatgtaagtccagaagatgactatcatgttcatatcggtagtaaagaatattttgaaataatttttgataataataaatatgaagaaattgacccaaaattaaaatctagggattttttaaaatttatagattcaaaaaaatatataaatagactaaaagaagctcataaaaaaactggtctatatgatgccataagagtagcaattggtttatcaaaaggcaaaaaaatagttatagcttgtatggattttagatttattggcggatcaatgggttcagttgttggagaaaaaatttcaagagcaatagattgttcaataaaacataggattccattaataataatttcaaagtctggaggtgcgagaatgatggagtctgctacctcgttgatgcaaatggctaaaacctccgcaaaattaaatcttttatctgaagaaaaaattccatacatatcattatgtactgatccaacaactggaggaacaacagcttcttttgcaatgcttggtgatataaatatttctgaacctggagctttaattgcttttgctggtccaagagttgttaaagacactgttggaaaagaactccctaaagggtttcaaacaagtgagtttcagcttgaaaaaggctttctagattttatatctcacagaaaagatttaaaaaataaaattaatctttacctagatcttattttaaacaaaaaagttagataa

SEQ ID NO: 319575 - DNA, 625 bp, Unknown
  Bacterial polypeptide expressing nucleotide sequence isolated from the Sargasso Sea
gcttgcaactaaaattaccacaaaagatattttaaattttaaagacacaaagtcttacggacagcgtattaaagaagctgttaaaagcactggagaagaagaggcaattattgttggtaagggtaaacttgagggtgttgaaattgtagttgcagcttttgaattccgttacatgggtggttcaatgggaggggcagttggaacaaaattcgttaaaggagttgatgaagcaattgcgagtaaagctccttttatatgtttttctacaagcggtggagctagaatgcaagagtccatggtttcattaatgcaaatggctaaaacttcagcagcattggaaaaactaaaagcagcaaaattaccgtatatatctgtaatgattgatcctatatatggtggagtttcagctagtatagctatgctaggagacattaatatagcagaacccaatgcattggttggttttgctggaaggcgtgtgattgagcagactgtaagggttgatttacccgaggactttcaaaaatcagaatttttattagagcatggagcgattgatatgatagtccatagaaaagacttgaggtataaggtttccagcattctatctaagctgtacccttaa

SEQ ID NO: 319576 - DNA, 573 bp, Unknown
  Bacterial polypeptide expressing nucleotide sequence isolated from the Sargasso Sea
attgaaatactatctagaatttgaagagccgatcagacttttagatgaggaaattcacctaaaagagtctatttcagaaaagtctacagaattaacaaaagaaatagcacttttacatgaggacaggttaaagctaataaacaagattcattcaaatttaactagatggcagagggtacaattagccaggcatcctgaaaggccatacgcattagactatatcaatctaatttttgctgattttttggaaatccatggagacaggttatttgctgacgatccagcagtagtagctggatttgcaaaaataggcgatagaaaagttgcaataattgctcagcagaaaggtagaaatactaaggagaatctatatagaaattttggtatgatgaagccagagggatacaggaaagcacttagaataatgaaattggcagagaaatttaaaattccaataattacacttatggatactccaggagcatttcctggaattggtgcagaagagaggggggcaggcgaggcaatcgcaaaaaatttaattgaaatgtcagctatgaaggttccaatatt

SEQ ID NO: 319577 - DNA, 509 bp, Unknown
  Bacterial polypeptide expressing nucleotide sequence isolated from the Sargasso Sea
tattattacctttattgatacgccaggggcctatccaggtattgaagctgaggaacgtggtcaagcggaagctatcgcgcgtaatttacgggatatgtcgggtattaaagtacccattataacagtggttattggggaaggtggatctggtggtgcattggggattggtgtttctaatcgtgtttatatgatggaatatgggatttactctgttatttccccagaagggtgtgcttctatcttatttagagatgctggaaaagcagacgtagcctctgagagtttgaaactgacggctaaagatgtagtgtccttgggtattgctgatggcataataccagaacctttaggtggggggcatacagattgggaacaggtatgttctgatattaaaaaggttataacaaaagatttgtctagttataaaactaaaaaggttaactctatattagatgaacgctatcaaaagtttcgttctatgggccagtttattgaagacggggcttgaa

SEQ ID NO: 319578 - DNA, 442 bp, Unknown
  Bacterial polypeptide expressing nucleotide sequence isolated from the Sargasso Sea
atgggctctgttgttggtgaatgtgtatttagatctattgagtatgctgataaatataaaattccatttattttaatttgctcttctggcggagcgagaatgcaagaatcagcattggctttaatgcaattagcaaaaactagttcaagattggccaagtttaaaagcaacggagggctttatattcctttactgacagacccaactacgggaggtgtaacagcaagttacggcatgctcggcgatattattttagctgagccaggtgcgcttattggctttgctgggccgagagtaattaaacagaccattggagaagaccttcctaaaggatttcaaacatcagaatttttattagaaaaaggttttatagatcatataatatctcgtgaagaaatgaaaacaaaactatcaaggataataaatcttctatcactgtgat

SEQ ID NO: 319579 - DNA, 433 bp, Unknown
  Bacterial polypeptide expressing nucleotide sequence isolated from the Sargasso Sea
tatggctaaacggtacctccttgattttgaaaagcctcttgttgaacttgagaagcagatagagcaaattaaagaattagctagagattcagaggtagatgttagtcaacagcttctacagcttgaaaccttagctgctagaagaagagaagaaatatttaaatctctcacccctgcccaaaagattcaggtagctagacatcctcaaagaccaagtactttggactttgttcaaatgttttgtgatgactggatcgaattacatggagatagaaatggtggtgatgatatggcactaattggggggataggttcgataaataatagaccagtgttgatgttagggcatcagaaaggaagggacacaaaagaaaatgtagtaagaaactttgggatggcaaaaccaggaggttacagaaaagctctaagatta

SEQ ID NO: 319580 - DNA, 808 bp, Unknown
  Bacterial polypeptide expressing nucleotide sequence isolated from the Sargasso Sea
tatggaaatttgtcagcatggcaaagagttcaactttcaaggcatccaaatagaccttataccttggactacataaaatatatttgtggtgattcattcctagaaatgcatggcgatagaaatgtaagtgatgataaggctatgattggcggtctcggtaaagtagataatcaatcatttatgttcattggaacccagaaaggttataatacaaaaacaagacaatacagaaattttggcatgtcaaaacctgagggttatagaaaagcacttaggttaatgaggcaagctgaaaaattcaatattccgatcgttacattaatagatacacctggggcttatccaggtcaagatgctgaagaaagagggcaaggtgaagctatagctaggaatatttatgaaatgatgaatattaaagttcctataatttctataattattggtgaaggtgcatctggtggggccttagggattggagtaggagataagatattaatgcttgagaacacttggtactcagtaatatctcctgagtcttgctcttctatattatggagaagctgggaacataaagaagaggctgcagaagcacttaaattgactgctgatgatatgcttaaaaataagcttattgataaaattattagtgagccacttggaggagctcattatgatcctgatgaaacttttaaatctgtaaaagaaaatattttattatttcataaaaaaattaagtccctatcaaaaaataaaatgatcaacaatcgcagaaaaaagtttacaaaaattggaaattttcgaggataaa

SEQ ID NO: 319581 - DNA, 781 bp, Unknown
  Bacterial polypeptide expressing nucleotide sequence isolated from the Sargasso Sea
catgaattggttaagaaggcttattccttctataggtacattaaagtcaaaaagcaaggttccagatggtttatggagttcctgtaaaaaatgtgactcagttttatacgttccagaattagaaaagtctctatacgtttgtccaaagtgcgattatcactttagaataggagcaagaaaaagactcgaaatctttctagacaataattcatataaagaaatttctccaaatttaacaacaaaggaccctcttaaatttaaagatttaaaacattattcttcaaggataaaagaggcagaggctaatactggtgaaaaagaagcaataattattgtagaaggaaacttagattctattaatgttgttgtggctgcatttgaatttagatttctgggtggatctatggggagtgttgttggggagaagtttgttcaggggattaatgctgcaataaaaaatagaaaaccttttatttgttttgcaacaagtggcggggcaagaatgcaagagtcaatggttgctcttatgcagatggctaaaacctctgctgcaatccagagactaaaaaaagaaaaactgccttatatttgtgttttagttgatccaatatttggaggagtatctgcaagtattgctatgctaggagatataaatattgctgagcctcatgcatcaagtggctttactggaagaagggtaatagaacaaactgttaggattgaattgcctgataattttcaaacatctgagtatttacttaataatggagcaatgatatga

SEQ ID NO: 319582 - DNA, 774 bp, Unknown
  Bacterial polypeptide expressing nucleotide sequence isolated from the Sargasso Sea
catgagttggttcaaaagaacaaacaaaaatattagtacaaaaactgaagagaagaaagatattcctgccggactctggtacaaaactcctagtggtaaaataattgaaacgaaagagttagctaaaaatttatatgttagtcctgaagatgactatcatgtccatattggaagcaaagaatattttgaaatattatttgacgatacatttaaagagttaaactctagaatgaagtcaattgactttttaaaatttgaagatcaaaaaaaatattcagaaaggctaaaagatgcacaaattaaaactaaccttaatgatgcaattagagttggatatggaaagtccttcggaaaggagctagtagttgcatgtatggattttaaatttattggaggatcaatgggatctgttgtaggtgaaaaaatatcacaggcaataactttcgcaattaaaaaaaagtaccctcttataattatttcaaaatcaggtggagctagaatgatggagtctgccacatctcttatgcaaatggctaaaacatctgctagacttaatgacttatctgaagctggattaccatatatttctctttgtactgatccaactactggtggaactactgcttcattcgctatgcttggagatatcaatatagcagaaccaaaagctcttattgcttttgctggccccagggttgttaaggatacgacaggtcaagatttgcctgaaggatttcaaagaagtgaatttttattagaaaaaggttttctcga

SEQ ID NO: 319583 - DNA, 475 bp, Unknown
  Bacterial polypeptide expressing nucleotide sequence isolated from the Sargasso Sea
tatggaatttttagagtttgaactaccaattaaaaaagtaatagatcaaattgataaatacaaatcaaaaaaaaatgaatcagctttaagtaattccaaaaaatataaactccttcaaaagaaacttgatgaagctaaaaagaatgtatatggtaacttaactccttggcaaaaggttcagttgtcaagacatcccaataggccttataccctagactatattaacaatatattaggagacacattccttgaacttcacggtgacagaaatatttctgatgataaagctatgattggtggtcttggaaaaattgataatcaaacttttatggtcatcggaactcaaaaaggaaataatactaaaacgagacaatatagaaattttggaatgtcgaatccagaaggctatagaaaggctcttaggttaatgaaaaaagctgagaaatttaatatacctgtaatctccacttattga

SEQ ID NO: 319584 - DNA, 958 bp, Unknown
  Bacterial polypeptide expressing nucleotide sequence isolated from the Sargasso Sea
ttgaagtattatttagattttgaagagcctttaaggctactggatgaagagatacatctgaaagaagcagttatggatccctcatcagaaatcaataaagagattgcaattctcattgaaaaaagattaaaaaagatcaatgaaattcatacctctctgggtcgttggcagagagttcagcttgctagacatcccgatagaccatattcgaaagattatatagataaaattttcacagattttgttgaacttcatggagacaggttatttgcagatgaccctgctgtaatatgtggtatagctaagttagatcaaaagaaaatagtaataattgcacagcaaaaaggaagaaatacgaaggataatttgtataggaattttggtatgatgagaccagaaggatacagaaaagcactgcggattatgaaattagctgaaaaatttaatctgccagtgattacatttatggatacgccaggtgcatttcctgggataggtgctgaagagcgagggcagggtgaggctatagcaagaaaccttcttgaaatgtcatctttaaaagttccaattgtttctattgttattggagaaggtgcaagtggtggagcacttgggattggagtttgcgacagattcttaatgatgcaaaatacttggtactctgtgattagtccagagggctgtgcttctatattatttcgagatgcaactaaagcggaggaggccgcagaggctctgaaggtgataccaaatgatttagtaaaaatgggtatctgtgataaaattattgaagagcctaatggaggtgcccacagagatatagaatcttcatcacaaaatttaaagtctgcaatacttagtgagcttaaagaattagaacctgtagatccactatcatttattgatcttcgaatacaaaaatatgataagcttggattctatgaggacttaaaatgat

SEQ ID NO: 319585 - DNA, 949 bp, Unknown
  Bacterial polypeptide expressing nucleotide sequence isolated from the Sargasso Sea
aatgaccagagaatatttagaatttgaagaaccaattgctcaaatagaaagacaaattttagagttagaatctgctggagatttaagtgctgatgatatctcttccgagatagaagttttaaataaatcaattatagagactactcaaaaaatttataagaagcttactccttggcaatgtgttcaggtagctagacatccttctagacctcatttttttaattatctagaaaaagtttttgaagattttgatgaattacatggagatagaagttttggagatgatagggccttagtaggaggtttagcaaagataggaaattattcagttgttgttatcggtcatgaaaaaggaagaacaacggaagaaaagttggaacataattttggcatgccacaaccggaaggatacagaaaagcaggaaggctaatgaaactagctgaaagatttgaaattccaatagttacatttatagatactcctggggcatatccaggtatcgatagtgaagaaagagggcaaagtgaggcaatagcatcaaacctcgaaataatgtctaacttaagaacccctatattagttaatgttattggagagggaggctcaggaggtgctttggctataggagttggagatacaatctctatgatggaatattctacttattcagtagcctctccagaggcttgtgcctctatcgtatggagggatccttctatggcaccacaagcagcagaagcaatgaaactaaattcagaaaaccttctaagtctaggattaattgatgaaataatagaggagccccttggaggggctcatagagatcctgatcaagcagcaacttctataaagaaatctataatcaataatttaactgaactttcaaagtacactatggaagatttattagatagaaggtatcagcggttaatgagttacggtaagtag

SEQ ID NO: 319586 - DNA, 628 bp, Unknown
  Bacterial polypeptide expressing nucleotide sequence isolated from the Sargasso Sea
atgagttggttagaaaaaatcttacctaaaacgactaagtcgtcaggtcgtaaagaaattccagaaggcgtttgggctaaatgtacagcttgcgattcaattttatataaagctgaactagaaaaatcattaaacgtatgtcctaaatgcgaccatcacatgcgtgtgagcggccgtaaacgtttagagcactttttagatgaaggtgaccgcacggagcttggtactgagcacgagcctaaagatgtattaaagtttaaagactctaaaaaatactcagaccgtattagcgcagcccaaaaatcaagtggcgaaaaagacgcgctagttgcaatgaagggccgcttaaaaggcatacctgttgctgcggttgcttttgaattctcatttatgggtggttcaatggcttcggttgttggcgcacggtttgttgatgccgtagaccaatgtttagagcacaacatgccattagtgtgcttttctgcctcaggtggtgcacgtatgcaagaagcacttatgtcgcttatgcaaatggccaaaaccagtgcagcacttgctaaaatgagcgaaaaaggattgccatttatttcggtaatgaccgacccaacaatgggtggtgtatcggctt

SEQ ID NO: 319587 - DNA, 826 bp, Unknown
  Bacterial polypeptide expressing nucleotide sequence isolated from the Sargasso Sea
aatgagctggtttactcgaaaaaaacaaaatataaataaaaatccaaagaaggatttaccaagcgatctttggataaagtgtcccaattgtggagaaattctttataaaccagaattagaggccaataatttcatttgccatcactgcaattttcattttccaataacaagcgagcagtaccaagatataattcttgacaagaaaaaagaaaatcttttttcagacattacctctattgatacgttaggattcaaggctaataaatcttatgaagaaattcttgaaaaagtcccaaataataaagaggcggtcgattgttttttaggagaagttgaaaaaagaaaagttgtattatgtattatgaattttaaattcattggcggaagtatgggcagcgctgttggagaaaaaatttcgaagtcaattagtctagcaagtgaaaaaaattgtccattaataattttatgtcaatctggtggagctagaatgcaagaaggagcattatccttgatgcaattatctaaaattagtactcatcttgcaaaattttcaaagaagggtgggttgtatatttcaattttaacttaccctactactggcggtgttacagctagctttggaatgcaagctgatgtaacaatagctgaaccaaaagctttaataggttttgctggacaaagagttattaagcaaaccactagtcaagaattacctgatcattttcaaacatctgagtttttaaaagagaaaggttttattgattttgttgtagatagaaagaatttaaaaaatagtatttctaaggttttggatgttttggcatga

SEQ ID NO: 319588 - DNA, 865 bp, Unknown
  Bacterial polypeptide expressing nucleotide sequence isolated from the Sargasso Sea
aatggcctggtttagacgacaaaaaaaaggaattcaaactgatacacaagacaaaaaagatactccagagggtctatggcataaaacaccatcagggaaaattgttgataatgacgaattaatcgataataactttgtttcacctgaagataattttcacttaagaattggatcacaagaatatttcaaaattctttttgatgacaatgaatatgaagttttgtttgataatttgattagtgcagacccattaaaatttgttgacactaaatcatacccaaaacgtgttaaagatgctcaaaagaaaactggtctaaatgaagctattaaggtagcatatggaaaatcatttggaaaaaaacttaccatagcatcgatggactttacatatattggtggctctatgggctcggttgttggagaaaaaatttcaagagctatagatcacgcaatcaaggaaaaatcgccgcttttaataatatcaaaatctggtggtgcgagaatgatggaaggtgcaatttcattaatgcaaatggcaaaaacttctgccaagttaactcaattgtcaaaaaataagcttccatatatttctttatgtaccgatccaacaacaggtggaacaactgcatcatttgccatgcttggtgatattataatatctgagccaggtgcattaattggttttgctggaccaagggtggtcaaagatactacaggacaagacctgcctgaaggttttcaaagatcagagtttttattggacaatggttttatagattttattagccatagaaatgatttaaaaaagaacatcaatttatatattgatttgatattaaatacccctctgagagcttacaattaa

SEQ ID NO: 319589 - DNA, 429 bp, Unknown
  Bacterial polypeptide expressing nucleotide sequence isolated from the Sargasso Sea
attgaagccatcagtcgagaattttcaggaacttcatggagatagaatgtatgcggatgatgccgcaattatttcaggacttgccaaaatcggcagcaggtctgttatgtttattgcacaagagaaaggtgctaatacgaatgaaaaaatgagaagaaactttggtatgccgagacctgaaggttatagaaaagcgcttagaatgatgaagttagcagaaaaatttcatattcctgttgtcacaattatcgatacaccgggagcttttcctggcataggcgccgaggaaagaggtcaaagcgaagcaattgcaagaaaccttttcactttggcatctttaaagactcctattataaatttagtgcttggtgagggaggatctggtggtgctttggcaattgggatgggcgataaactcataatgctgaa

SEQ ID NO: 319590 - DNA, 679 bp, Unknown
  Bacterial polypeptide expressing nucleotide sequence isolated from the Sargasso Sea
atgagttggtttaaaagaagtaaaaagggaattttaacaagcacagaagagaaaaaaaatattcctgaaggattatggtacaaaactccttctggaaaagttgttgaaaccaaagaattagctgaaaatttttatgtaagtccagaagacgactatcacatccacataggtagcaaagaatattttgaaattatttttgatgataatgattttgaagagttggatgaagggttaaaaccaaaagattttttaaagtttgttgataataaaaattataaagacagaataatagaagctcaaaagaaaacaaatttaaaagatgctttaagatctgcagttggaaaatctaaaggtaaagaagtagttgtttgttgtatggattttgcttttataggtggctctatgggttcagttgttggagaaaaaatagctagagcaacagatttttgtgtcaaaaactcctatcctcttctaattatatctaaatcaggaggagcaagaatgatggaatcagctacttcgttaatgcaaatggcaaaaacgtcagcaaagcttgctcatttggctgaggcaaaactaccgtatatttctttatgtactgatccaacaactggtggaactacggcatcctttgctatgttaggtgatataaatatcgctgaaccaaatgccttgattg

SEQ ID NO: 319591 - DNA, 961 bp, Unknown
  Bacterial polypeptide expressing nucleotide sequence isolated from the Sargasso Sea
atggatttcttagattttgaaaaaccaattgtagagcttgaaagaagaattgaagagctcagattgaccaatacggatgcagacaccgcaatcgagctagatgatgagattgagaggcttcaaaaaaagtgtgagtctctgacaaaaaaaatctttggcagtctcagtgaatggcaaattgctcaactcgcaagacatccgcttagacctaaatccattcaagtgattgaggccatcagcgaggactttcaagagcttcatggcgatagaatgtatgcagatgattccgcaattatttcagggcttgccaaaatcaataaccaatcagtgatgtttattgcacaagaaaagggcaataacaccaatgagaaaatgaaaagaaatttcggtatgcctagacctgaaggatatcgaaaggcacaaagaatgatgaagcttgcagaaaaattcaaaattcccattgtcaccatcatcgacacacctggagcatttccaggaattggggctgaggaaagaggccagagcgaagcaatcgcaagaaaccttttcactcttgcatctttaaaaactcccattattaatcttgtacttggagagggaggatcaggtggcgcattggcgataggcatgggagataaactcatcatgcttgaatactcaatttattctgtgatttcaccagaagcatgttcatccatcttatggaggacgcctgatgagacagaaactgctgctgaggcaatgggaatttcatcttctcgattgaacaaattgggactggttgatgagatcattgatgaaccgcttggaggatttcataggaatccagagaaaactttcacatcaatcaaagaaagtattgctaatgcacttcatatccttcaatcagaagatccagagaccttacttgaacaaagaagagcaagatataaggcaattggcgaattcaatgaaaactgat

SEQ ID NO: 319592 - DNA, 601 bp, Unknown
  Bacterial polypeptide expressing nucleotide sequence isolated from the Sargasso Sea
atgaattggcttacaagattaattccttcaataggaaaaagctctacaaaatcaaaaagtaagattcctgatggtgtttggacgtcctgtccttcatgtgaatcagcactttatcagccagagttacaaaaaaccttatacgtatgtccaaaatgtgatcatcacttaaggattggcgctagaactagattcaatattttctttgataatggaaatttcactgaaattgcatcaaatgtcgaaacgggagatcctcttggctttaaagacgttaaagcatatcctgcaagaattaaagaagctaagaaaaatactggagagagtgaggctctattggttggatttgggaagcttgatggaagactagttactgctgcagcatttgaatttaagtttatgggtggctcaatgggaagtgtagttggcgagaaatttgttcaaggtattgagcaagcaattgagaacaagacgccatttatttgtttttcaacaagcggtggggcaagaatgcaggaatcaatggtttcccttatgcaaatggcaaaaacatctgctgcaattcaaaaattgaaatcaaataagctgccttatatatctgtaa

SEQ ID NO: 319593 - DNA, 826 bp, Unknown
  Bacterial polypeptide expressing nucleotide sequence isolated from the Sargasso Sea
gatgagctggtttacccgaaaaaaacaaaatatagaaaaaaatcctaagaaagatttgccgagtgacttatggattaaatgtccaaactgtggcgaaattctttatataccagaattagaagctaataacttcatttgtcatcattgcaattttcactttcctataactagcgaaaaatatcaagagattattcttgatgaaaaagctgatagtcttttttctgaagtaacttctattgatatgttaggattcaaggccaataaatcttatgaagagatactggaaaaggttcctaataataaagaagcagttgattgtttttttggtaaaattcaagaaagaaaagtagtgttatgtattatgaactttaaatttataggcggtagcatgggaagtgctgttggtgaaaaaatttcaaaagctattaacctggcaagtgaaaaaaattgtccaattataattttatgtcaatcaggtggagcaagaatgcaagaaggagctctatcattaatgcaattatctaaaattagtactcatcttgcgaagttttccaaaaagggtggattatacatttcaattttaacttatcctactaccggtggtgttacagctagttttggtatgcaagcagatgttacaattgctgaaccaaaagcgttgattggatttgctggacagagagtaattaaacaaactacaagtcaagaattgcctgaccattttcaaacatctgaatttttaaaagaaaaaggttttattgatcttgtagttgatagaaaaaatctaaaaaatagcatttcaaatgtattagaagttttaacatga

SEQ ID NO: 319594 - DNA, 697 bp, Unknown
  Bacterial polypeptide expressing nucleotide sequence isolated from the Sargasso Sea
ttgcgaagtaaagaatattttgaaatcctttttgatgggaaatttaaagagattggaattaatgttgcaccagttgattttctaaaatttcaagatcaaaagaaatattctgatagacttaaagatgcacagaacaagacaaaattaaaagatgcaattagagttggttatggcaaatctcatggtaaagaggttgttattgcatgtatggactttaagttcattggtggttctatgggatctgtagttggtgagaaaatttctatgtcaattgattatgcaataaaaagaaaatgtcctcttattgttatatctaagtcaggaggtgctagaatgatggaatctgcaacttcattgatgcagatggcaaaaacatctgcaaaattaaatgacttgtctgaagcaagtcttccatatatctcattatgtactgatccaacgactggagggactacagcatctttcgcaatgcttggagatatcaacattgcagaacccaaagccttaattgcatttgcaggacctcgagttgttaaggatactacaggtcaagatcttcctgagggcttccaaaagagtgaatttcttcttgaaaaaggatttcttgattttattacacacagaaaagatttaaagaaaaaagttaacctttacattgatttaattcagaataactctcttcgtaaatatgattaaa

SEQ ID NO: 319595 - DNA, 856 bp, Unknown
  Bacterial polypeptide expressing nucleotide sequence isolated from the Sargasso Sea
atgaattggtttaagaaattagttccttcaaggataacgacaaaaaaacaacaacgggttaagtctgttccagaaggcgtttgggtgacctgtgattcatgcggtgctcaattgtatcgagctgagctcgagaggaatttgcatgtttgcatcaagtgcaatcatcatatgagaatacccgccagaaaaagactcgaaagtttttttgacccttcatcaacaacggaatattttgcaaacctttcagccaatgatcctctcaaattcagagacactaaaaggtatagagaccgtatttctgaatcgacaaaaaaatctggagaaaaggatgctctcattgttatgtcaggaaaggttaatgaaatcgaaatgatcgcatgtgcctttgagttcaagtttttaggtggatcaatgggatcagtggttggagaaaaatttgttcgagcagtgaatttaagtattgaaaaaaatgcaccattggtcagtttttcatcaagcggaggagcaaggatgcaggaagctttcttgtctttgatgcagttggcaaaaacgacgtctgctttggttgagctggatgcaaagcgcatcccttatatttcggttcttaccgacccaacaactggaggtgtctcggcaagcatagcaatgcttggcgatataaatcttgctgagccaggtgcattgataggatttgctggacccagagtgattgagcaaaccgtcggagagaaactgcctgaaggatttcagagaagcgattttttattggaaaaaggtgccattgatatgattgttgatcgtcgccaaatgagagacaccattgctacattgatttccaatttaatgaataactaag

SEQ ID NO: 319596 - DNA, 730 bp, Unknown
  Bacterial polypeptide expressing nucleotide sequence isolated from the Sargasso Sea
atggcttggtttaagagaaaagataaaaagttaaaaaatccagagaaaaaatcaattccagatggcttatgggacaaatgcccttcgtgtaatgaaataatttaccgcccagagcttgaaaaaaaactatcagtttgccatcattgtaaccaccattttagaatttctccgcaaatatatgtagatctgcttttagataaaggaacatatagaagacattttcaagatattatttccacggactttttgggttttaatgcaaataaagcctatagcgatcagataatagaggcgacaaataaaacgggagataatgatgcgatatgtgtatacgatggtgatattaactctcatagagttatactagggatcatgaattttaaatttattggtggaagcatgggttctgtggtcggtgaaatagtctcaagggctttggtgttagccggtgatattaaagcaccttttattttaatctgttcttctggtggtgctcgaatgcaagagggtgcaatttcacttatgcagcttgcaaaaaccagtacccagttagcaaaattttctggtgaaggtgggctttttattccaatactaactgatccaacaacaggaggtgttactgcaagttatggaatgctaggtgatgtgatcttggcagaaccaggggcattaattggatttgctggaccaagagtgatcaagcagaccattggtcaagattaccagaggg

SEQ ID NO: 319597 - DNA, 922 bp, Unknown
  Bacterial polypeptide expressing nucleotide sequence isolated from the Sargasso Sea
aatgaagcagaagcaatctacacaaacggaccacaaaccggagtccgagtctttccgaaatcagcacgactcttctcagcgtccatcaatgacagaaggcccacgaatgccggggcctcgtcccaaaagaggtgttcccgaaggattatggcttaaatgcaatggatgcggttcgacgatataccgaaaagaagctgaagagatgctcaacgtctgccctcaatgtggctttcattggtatgtttcagcaaagcaaagaattgaacaacttttcgacccaggaacatttgaagagtgggatggtggcctgcaaccgaccgacccactaactttcagcgataaaaaaccttacgccaaacgaatcgtatctgaacaaaagcgaactggcttatcggacgctgccctgactggaaccgggatgattcgggcacgacgcgtagcctgtggtgttaccgactcttcctttattatgggtagcatgggaagtgtcgtcggtgaaagactggcaagacttattgaacgcgccactactgaatctcttcctctcataataataagtgcttctggtggtggggctcggatgcatgaaggaatattgtccctcatgcagatggcaaaagtatccgctgcactggctcgttattcggagtctggtggattgttcatctcggtactaacaaacccaacgatgggtggcgtcgccgccagctttgcctctcttggtgatctcgtatttgccgaaccaagagcactcattgggtttgctggaccaaggacaattaaagcaacaatcagagttgaacttcctgcaggatttcaaacaagcgaattcttactggagcatggcttcattgatcgaatcatcagtcgccagaatctaaaaagtgaaattgcgcgagctattgactactgtggtggctga

SEQ ID NO: 319598 - DNA, 761 bp, Unknown
  Bacterial polypeptide expressing nucleotide sequence isolated from the Sargasso Sea
aagttgtaacaatcatatgtacatgtctcctgaggaccgcttcagatcattatttgatgatagcctatactcggcgattgattatgacgctccagcacaggatcctctgaatttcaaagatacgaaaaaatatactgatagaataaaggatgcgcaaagaagtactgggcaaaaggaagcaattttaatttctgaaggtcaattaggaggcatgaaaacgataatagcctgtcaagactttaagttcatgggaggttctatgggtatggccgtaggaaacgcaattttagaaggggtaaaaagagcggtgaagaataaatctccttttattttatttgctgctgctgggggtgccagaatgcaagaaagtgttttgtcattaatccaaatgcccagaacaacagtcgcaattgaaatgctaagagatgctaaacttccctatatagtcgtattaacaaacccaaccactggtggagttacagcgtcttatgcaatgctaggagatgtgcaaatagccgaaccaaatgcactaatttgttttgctggcccaagagtgatagagcaaacaattagggaaaggctaccggagggatttcagagatcggagtatttgttggaccatggaatgcttgataaagtagtacctagaaaatttatgagagaagagctgataaaattaatatatctattaaaaaatcaacctccacctattaggggaaatattacagagtttgatggacctaatggacgagatacttaaa

SEQ ID NO: 319599 - DNA, 422 bp, Unknown
  Bacterial polypeptide expressing nucleotide sequence isolated from the Sargasso Sea
gattttatttgcagcagccggtggcgcacgaatgcaagaaggcattttaagtttaatgcaaatgcctagaacaaccgtggcaatccaaatgctaaaagaggcaaaacttccctatatcgtagttttaactcatccaactacgggaggtgttaccgcatcttatgctatgcttggcgatattcatattgcagagccaaatgcattaatttgttttgctgggcccagagtgatcgagcaaaccattcgagaaaaactacccgaaggatttcaacgagcagagtaccttttagaccacggtatgttagatcgagtgacttctagattagaaatgcgcgatgaactaattacagttattcgcatactcactaacaaatcaccacaaataaagggtgatttaccttcaccgacgcaagaaacttaaa

SEQ ID NO: 319600 - DNA, 490 bp, Unknown
  Bacterial polypeptide expressing nucleotide sequence isolated from the Sargasso Sea
aatggaagaaataactgctgcagcctttgaatttaactttatgggtggctcaatgggcagtgcagttggagagaaatttgtgcaaggtgtaaaagttgcgatgaaagaaaaaacaccttttatctgttttgcaaccagtggtggagcaagaatgcaggaatcgatgatttctcttatgcaaatggcaaagacttctgcggtaattcaaaaattcaaaaaaatgaatcttccttatatctctgtgatggttgatccaatttttggaggagtttctgcaagtttggcaatgcttggagatataaatattgctgagccgaaagcttttgttggttttgccgggagaagggttatcgaacaaactgtgagagtggaacttcctgaggattttcaaaaatctgaatttttgcttgcccatggagcagtagatatgattgttcacagaacagagatcaaatctaaaatctcaggacttcttgagaaaattttataa

SEQ ID NO: 319601 - DNA, 785 bp, Unknown
  Bacterial polypeptide expressing nucleotide sequence isolated from the Sargasso Sea
aattccagatggtctatgggacaagtgcccttcgtgtaatgaaataatttaccgcccagagcttgaaaaaaaactatcagtttgccatcattgtaaccaccattttagaatttctccgcaaatatatgtagatctacttttagataaaggaacatatagaagacattttcaagatattatttccacggactttttgggttttaatgcaaataaagcctacagcgatcagataatagaggcgacaaataaaacgggagataatgatgcgatatgtgtatacgatggtgatattaactctcatagagttatactaggaatcatgaattttaaatttattggtggaagcatgggttctgtggtcggtgaaatagtctcaagggctttggtgttagccggagagattaaagcaccttttattttaatctgttcttctggtggcgctcgaatgcaagagggtgcaatttcacttatgcagcttgcaaaaaccagtacccagttagcaaaattttctggtgaaggtgggctttttattccaatactaactgatccaacaacaggaggtgttactgcaagttatggaatgctaggtgatgtgatcttggcagaaccaggggcattaattggatttgctggaccaagagtgatcaagcagaccattggtcaagatttaccagagggattccaacggtcagaatttcttttagaaaaaggatttattgatcatatagtagacaggaatagtatgaaggaaaaactttctactttgatatctattctttcatgaa

SEQ ID NO: 319602 - DNA, 856 bp, Unknown
  Bacterial polypeptide expressing nucleotide sequence isolated from the Sargasso Sea
atgaattggtttaagaaattagttccgtcaaggatcacgacaaaaaagaagcaaagggttaagtctgtgcctgaaggcgtttgggtcacttgtgactcttgtggcgctcagttgtatagagctgagcttgaaagaaatttaaatgtctgtatcaaatgcaatcaccacatgagaatacctgccagagaaaggcttgagagtttctttgatccatcgtcatctacggagtattttgcgaaccttacagccaatgatccactgaaattcagagacacaaaaagatatagagaccgcatctctgagtcgacaaagaaatcaggagaaaaggatgccctgatcgttatgtctggaaaggttaatgagattgaaatgatcgcatgtgcttttgagttcaagtttttaggcggatcaatgggctcagtggtaggagagaaatttgttcgagcagtcaatttaagcattgagaaaaatgcaccactggtcagtttttcatcaagcggtggcgcgaggatgcaagaagcattcttatctttgatgcaattggcaaaaacaacatctgctttggttgagttggatgcaaaacgcatcccatatatttcagttcttactgacccaacgactgggggtgtctcagcgagcatagcaatgcttggcgatataaatttggccgagccaggcgcactgataggatttgctggacccagagtcattgagcaaaccgttggggaaaaattgcctgaaggatttcaaagaagtgatttcttattagaaaaaggtgccattgatatgattgttgatcgtcgccaaatgagggataccatttctactttgatttctaatttaatgaatcattaaa

SEQ ID NO: 319603 - DNA, 955 bp, Unknown
  Bacterial polypeptide expressing nucleotide sequence isolated from the Sargasso Sea
tatggaatttttagaatttgaattaccaattaaagaaataatagatcaaattgataagtacaaatcaaaaaaagatgaagcaggtttaagtaattccaaaacatataaacttcttcaaaagaaacttgatgaaactaaaaagactatatatggtaacttaactccttggcaaaaggttcagctgtcaagacatcccaatagaccttatactttagactatataaaaaatatattaggagatacattccttgaacttcacggtgacagaaaaatttcagatgataaagctatgattggtggtcttgggaaaattgacaaccaaacttttatgatcataggtactcaaaaaggaaataatactaaaatgagacaatatagaaattttggaatgtcaaatccagaaggttatagaaaggcccttaggttaatgaaaaaagctgagaaattcaatatacctgtaatctcacttgttgatactcctggagcatatccaggccttgaggctgaagaaaggggtcagggtgaggcaatagcaagaaatctatatgaaatgatgtcacttaaggtccctattattgttataattattggagaaggcgcttcaggaggtgctttagggattggtgttggagataacataatgatgctagagaatacatggtactcggttatctctccagaatcatgttcttcaattttatggagaagttgggattataaagagaatgctgctgaggctttgaagttaaccgcagatgatatgtatagaaataaacttattgacaaaattataaaagaaccttttggtggagctcattataataaagaggaggtttattataacgttaaaaaagaaattattaagtcatacaagaaactacaaggattatcatcagaaaaattaatctcaaatagaagagataggttttataaaatcgggaattttaataattaa

SEQ ID NO: 319604 - DNA, 964 bp, Unknown
  Bacterial polypeptide expressing nucleotide sequence isolated from the Sargasso Sea
catgaacaccagcaagacatacctggaatttgaaaagccgatcaaggagatcgaccagaagatcgaggaaatgatcgcacgtgcggactccgaaaatctcgacatgacgactgagattggggccctaaagaagcgcgcaagggacctcgagcgggagacatacaggaacctgactcgatggcagcgcgttcaggtcgccagacatccacaacgcccctacacaatggactacatcgacacgatgcttacggatttcgtggaactccacggtgaccgccagtatcgcgacgatcccgcgatcgtcggagggcttggacgaatcgacggccgaccgattatgctgatcggtcagcagaagggtcgaaacaccaaggagaacctccaccgaaatttcgggatgccctatcctgaaggctaccggaaggctctgcgcctaatgcatatggcagcaaaattcgcgcgcccggtggtctgtctggtcgacacacccggcgcgttcccgggactcggctccgaggagcgaaacgtatcagaggcgatcggaaggaatctgttcgaaatggcgaagctccccgtcccgatcatcgtcgtaatcatcggggaaggcgcgagcggtggagcactcggaatcggagttggtgaccgcatattgatgctagagaacgcgtggtactccgtgatcaacccggattcgtgctcgcttatcctatggcgaaatcgcgacaagaaggaagaggcggctgacgctatgaagatcacggccgacgacctgaccgaatacggaatcgtcgatcgaatcgttagggaacccatgggaggcgcccacaaggatcccatccaggcatcggacaacctgaagcgagcgatcgttgagaccctcgatgagctcgccgcgatcccggtcggatccctttcaccggagcggatcgaaaagttctcgaagatgggtgtctgggaagaataa

SEQ ID NO: 319605 - DNA, 720 bp, Unknown
  Bacterial polypeptide expressing nucleotide sequence isolated from the Sargasso Sea
tatggctaggcgttttctactcgaatttgaaaaacctcttgttgaattagagaatcagattgatcaaatcagagaattagcaagagattcagaagttgatgtaagtcagcaacttttgcaattagaaacacttgcagcacgaaggcgagaagaaatatttaatgcacttactccagctcagaagattcaagtagctaggcacccccaaaggcctagcacactcgattacatacagatgttttgtgatgattgggttgaattacacggagacaggaacggaactgatgatcaggctctaataggagggttagctcgaataggtgaaaaatccgtccttttaattggacaacaaaaaggtagagatacaaaagagaatgttgcaagaaactttggcatggcaaaacctggaggctacagaaaggctttgaggctgatggaccatgccgatcgctttgatctaccaatcatctctttcatagatactcctggagcttatgcagggctcatagcagaagaacaaggacaaggagaggcaatcgcagtgaatttacgagaaatgtttaggcttaaagttccaataattgcaactgtaataggggaaggtgggtctggtggtgcattggggataggcgtcgcagacaggttacttatgtttgaacatagtgtttacacagttgcaagccctgaagcttgtgcttcgattctatggagggatgctgg

SEQ ID NO: 319606 - DNA, 355 bp, Unknown
  Bacterial polypeptide expressing nucleotide sequence isolated from the Sargasso Sea
ttgaaggaggctaacttaccatacattgtaattcttacacatcccacaacgggaggagtaactgcatcatatgcaatgcttggcgacgttcagatttcagagcctaacgcgctaatttgttttgcaggaccgagggtaatagaacaaacaattcgagaaaaactaccagaaggtttccaaagagctgaatatctactcgatcacggaatgttggacctggttacgccgagaactaaaataagaaatgaattaattaaaataatacgaatgctgcttggtctcagtccagtagttgttggagacttaccaaagcctccgccagataacccatcggaagaagccaaagaactctaaa

SEQ ID NO: 319607 - DNA, 823 bp, Unknown
  Bacterial polypeptide expressing nucleotide sequence isolated from the Sargasso Sea
atgagttggtttactagaaaaaaacaaaatattgaaaaaaataccaagaaggatcttcctaatgatttatggaggaagtgttcttgcggagaaattctttataatcctgaactagaagcttctttttctatttgccatcattgtaactttcattttccaattacaagcgaacaatatcaagatatcattctcgacaaaaaaactgagagtcttttttcagatatttcttcaatagatatgttaggatttaaagcaaataaatcttacgaagaaatacttgaaactgttcctaataataaagaggcggtagattgttttttgggagatattgaaaaaagaaaagttgtattgtgcatcatgaattttaaattcattggcggaagtatgggcagtgctgttggagaaaaaatttcaaaagcaatcagtttagcaagcgaaaaaaactgtccaataataattttatgtcaatctggaggagctagaatgcaagaaggagcattatcattgatgcaattatctaaaataagtactcatcttgcaaaattttcaaagaagggtggattgtatatttcaatattaacttaccctactactggcggtgttacagctagctttggaatgcaagcagatgtaacaatagctgaaccaaaagctttaattgggtttgctggacaaagagttattaagcaaactacaagtcaagaattacctgatcattttcaaacatctgagtttttaaaagagaaaggttttattgattttgttgttgatagaaagaatttaaaaaatagtatttctaaggttttggatgttttggcatgaa

SEQ ID NO: 319608 - DNA, 602 bp, Unknown
  Bacterial polypeptide expressing nucleotide sequence isolated from the Sargasso Sea
catgaattggttaagaaggttaataccatcaattgcaactttcaaatcaaagagcaatgtccctgatgggttgtggagtacatgcaaaaaatgtgaatctgtgctctatgttcctgagcttgaaaagtctttatttgtttgtccaaaatgtggttatcacaatagaattggagccagacaaaggctcaatatgtttcttgacaataataactatactgaaatagcaccagacctgattactaaagatcctttaaaatttaaagactctaaacactacacctcaagaattaaagaagctgtagcttcaactggagaaaaggaggcgcttttagttgtttcgggtgaattagatcagcgaaaagttattgttgctgcatttgagtttagatttatgggtggctcaatgggtagcgttgttggcgaaaaatttgttcaaggcattaaaacagctataaaaaataaatgtccatttatatgttttgcaacaagtggtggagctagaatgcaagaatctatgatctcacttatgcaaatggcaaaaacctctgcagctattcagaaactcaaaaaagaaaaattaccatacatttctgttttagttg

SEQ ID NO: 319609 - DNA, 958 bp, Unknown
  Bacterial polypeptide expressing nucleotide sequence isolated from the Sargasso Sea
aatgtcagactattatttagattttgaacttcctcttaaagaaatagatcaaaaaattcttgagcttgaatcagatcctaattcaaaaaatacttcagaggaaatttcatctctttcattgcaaaaaaaagagcgcttagaagaaatattttctaagctaacacgttggcaaaaagtgcaactagcgagacaccctcagcgcccgctttcaatggactatattcactctttatctcctgattttatagaacttcatggagatcgctattttggagatgatcctgctattatttgcggattgggatcgatcgatggaaataaagttgtatatatcgctcaacaaaaagggaaaaacactaaagaaaatatttttagaaattttggaatgatgagacctgaaggatatagaaaagcgcttcgtattatgaaattggctgagaaattcagcctcccaatcatttcattaattgatacacctggagcatatccaggtattggtgctgaagaaagagggcaaggtgaagctattgctagaaatctttttgaaatgtcaagtctagaaacccctataattgccgtagttattggagagggcgcaagcggaggcgcacttggaataggaatctgcgataaaatgttaatgcttgaaaatacatggtattcggtaatcagccctgagggttgtgcttcaattttgtggcgcgatgcagcaaaagcgcctgaagctgctgacgcgatgaaggttgcccctgaagatctttttgaaatggaaatatgcgatgaaattataaacgaacccttaggcggggcgcatcgcgaatttgagcaaactgcattttcattaaaatcttcagttttagataaaattgaaatccttaactctgttgatcctaagacttttttagatcaacgcattaagcgttatgaaaaaatgggtaaaatatcagaagaaaaatga

SEQ ID NO: 319610 - DNA, 811 bp, Unknown
  Bacterial polypeptide expressing nucleotide sequence isolated from the Sargasso Sea
atggacttcttagattttgaaaagccaattgtcgagctcgagagaagaattgaagagcttaaattgaccaatactgacgcaaacactgcaattgagttggatgatgaaattcataggcttcaaaagaagtgtgcatcgctaacaaaaaaaatctttagtaatcttagcgaatggcaaattgctcaactcgctagacatcctctaagaccaaaatccattcaagtaattgaagccatcagtgagaattttcaggaacttcatggagatagaatgtatgcggatgatgccgcaattatttcaggacttgccaaaatcgatagcaggtctgttatgtttattgcacaagagaaaggtgctaatacgaatgaaaaaatgagaagaaactttggtatgccgagacctgaaggttatagaaaagcgcttagaatgatgaagttagcagaaaaatttcatattcctgttgtcacaattatcgatacgccgggagcttttcctggcataggcgccgaggaaagaggtcaaagcgaagcaattgcaagaaaccttttcactttggcatctttaaagactcctattataaatttagtgcttggtgagggagggtctggtggcgctttggcaattgggatgggcgataaactcataatgcttgaatattcgatttactctgttatttctccagaggcttgctcatctattttatggagaaccccagatgaaactgaaagagccgctgaagcaatgggtatttcatctagtcgactgaatgaactcggattgattgatgagatcattgaggaaccgctcggcg

SEQ ID NO: 319611 - DNA, 664 bp, Unknown
  Bacterial polypeptide expressing nucleotide sequence isolated from the Sargasso Sea
gaggagatcggtgccgatctcgagccggtcgaccgcctgaaattccgcgacagcaagaaatacaaggatcgtctggccggtgcgcagaagcagactggcgagaaagacgcgctgatctccatgagcggcaccctcgaaggtatgccgatcgccgtttgcgcgttcgagttctccttcatgggcggctccatgggcgccatcgttggcgagcgtttcgttcgggcggccaatgtcgcactggaaaaacgctgtccgctggtgtgcttctctgcttccggcggcgcgcgcatgcaggaagcgctgatctcgctgatgcagatggccaagacttccgccgccctggcgcgcctgcgtgaagaaggcctgccgttcatctcggtgctgactgacccggtctatggcggtgtttccgccagtctggcgatgcttggtgatgtcatcgtggccgagccgaaggcgctgatcggttttgccggcccgcgcgtgatcgagcagaccgtgcgcgagaggctgccggaaggcttccagcgtagcgagttcctgctggaacatggcgccatcgacatgatcatttcgcgcaatgaactgcgtccgcgcctggcgcgtctgcttgcgcaaatgatgaatcgtccgtctccggttcccctgccggccactgcatgac

SEQ ID NO: 319612 - DNA, 902 bp, Unknown
  Bacterial polypeptide expressing nucleotide sequence isolated from the Sargasso Sea
aatgaagaccacctttctggatttcgaacagccgatcgctgaactcgaagcgaagatcgaagaattgcgcttcgtgcaggacgattcggccgtcgatatttcggaagagatcgagcggctgtccaagaaaagccaacagctcaccaaagatctgtacgcgaacctcactccgtggcaggtttcgcaaatcgcccgacatcctcaacgcccgtacacgttcgattacgtgaacgagctgttcaccgatttccacgaactgcacggcgaccgtaactatgcggacgacctgtcgatcgtcggtggcctcgcgcgtttcaacggccaggcctgcatggtgatcggccatcagaagggccgtgacaccaaggagcgcgcgctgcgcaacttcggcatgccgcgtccggaaggctatcgcaaggccgaacgcctgatgcgcctcgccgagaagttcggcttgccgattttcacgttcatcgacacaccgggtgcgtacccgggtatcggcgcggaagagcgtggccagtccgaagcgatcggccgcaatctgtacgtgatggctgaattgaagacgccgctgatcgccacgatcatcggtgaaggcggttcgggcggcgcgctcgcgattgccgtcggcgatagcgtgctgatgctgcagttctcgacctactcggtgatttcgccggaaggctgcgcgtcgattctgtggaagagcgccgcgaaagcgccggaagccgcggaagcgctcggcttgaccgcgcatcgtctgaaggcgctcggtctgatcgacaagatcgtcaacgagccgctcggcggcgcgcaccgcgatccgaagggcatggccgccatggtgcgccgtgcgctcgccgattcgctgcgccagttccagggtatgagcatcaacg

SEQ ID NO: 319613 - DNA, 793 bp, Unknown
  Bacterial polypeptide expressing nucleotide sequence isolated from the Sargasso Sea
gaatggcaaattgctcaactcgctagacaccctctaagaccaaaatccattcaagttattgaagccatcagcaagaattttcaggaacttcatggagatagaatgtatgcggatgatgccgcaattatttcaggacttgccaaaatcgatagcaggtctgttatgtttattgcacaagagaaaggtgccaatacgaatgaaaaaatgagaagaaactttggcatgccgagacctgaaggttatagaaaagcgcttagaatgatgaagttagcagaaaaatttcatattcctattgtcacaattatcgatacgccgggagcttttcctggcataggcgccgaggaaagagggcaaagtgaagcaattgcaagaaaccttttcactttggcatctttgaagactcctattataaatttagtgcttggtgagggaggatctggaggcgctttggcaattgggatgggcgataaactcataatgcttgaatactctatttactctgttatttctccagaggcttgttcatctattttatggagaaccccaggtgaaactgaaagagccgctgaagcaatgggtatttcatctagtcgactgaatgaactcggattgattgatgagatcattgaggaaccgctcgggggttttcacagaaacccagatgaaacatacatttcaatcaaaaaaagtatcattaattcacttcaagcaattgaatcaattgaaccagagaacttacttgaacaaagaagagcgaggtacaaggcaattggtgaattcaatgaaaactgat

SEQ ID NO: 319614 - DNA, 694 bp, Unknown
  Bacterial polypeptide expressing nucleotide sequence isolated from the Sargasso Sea
gcacggtgatcgtcactttgctgacgatgctgcgattgtgggcggtatcgctcggctggacggccgtgcagtcatggtcatcggtcaccagaaaggccgtgatgtaaaggaaaaggtacgccgcaacttcggcatgcccaagcctgaaggctaccgcaaggcctgccgcctgatggaaatggccgagcgcttcaagatgccgatcgtcacctttatcgatacccccggtgcctaccccggtatcgacgctgaagagcgcggtcagagcgaagccattgcctggaacctgcaggtcatgtcgcgcctgaagaccccgatcatcgccaccgttatcggtgagggtggctccggcggcgcgctggcgattggtgtctgcgatcacctgatgatgctgcagtactccacctattcggtgatctcgcccgaaggctgtgcctccattttgtggaagagcgccgaaaaggccgcagacgcggcggcggccatgggtattaccgccgagcgtttgaaggagctgggcctggtcgacaccctgatccccgagccgctgggcggcgcgcaacgctcacctcaggagaccgctgcgcgtatcaagcagcagttgattacccagctggataaactgagtgcccattccagcgacgagctgctggaagcgcgttaccagcgcctgatgtccttcggtattcagtga

SEQ ID NO: 319615 - DNA, 505 bp, Unknown
  Bacterial polypeptide expressing nucleotide sequence isolated from the Sargasso Sea
ggtagtatcaataatcatgaattaattctttcagtaatgaattttgaatttattggtggaagcatgggatctgtagttggagaacttgtctcaaggtcaattgatttagcaagagagaaaaaaattcctttagttcttatatgtgcatctggaggagcaagaatgcaggagtctgcattttctttaatgcaacttgccaaaacaagctcaaaattagctagatttcaaaaagaaggaggattatatatacccatcctcactgatccaactacaggtggagttactgcaagttttggtatgcttggagatataattttggctgaaccaggtgctttgattggtttcgctggccctcgagtaattaaacaaactattggtgaagatttgcccgatggctttcagcgagctgaattattaaaagaaaaagggttcattgatcatattgtttctagatcagatatgaaagaaaaattatctagtctaatagaattacttacaaaatgag

SEQ ID NO: 319616 - DNA, 570 bp, Unknown
  Bacterial polypeptide expressing nucleotide sequence isolated from the Sargasso Sea
aaacacaaaacaagaccggcgagaaagatgcacttctagtttttacgggaaatctaaaaaaaatacctattgttgtctgcgcatttgaatattctttctttggtggatctatgggatcggttgtgggagagaagtttaatagagctgtaaacttagctatcgaactcagaagacccttagtttgtttttcagcaagtggtggggctcgcatgcaagaatcacttttctcattatttcaaatgtctaaaactagtgctgcgcttgcaaaattatctgaagaagccattccatatatttctgttctaacggacccaactatgggaggagtatctgctagtcttgccgttttaggagatattaatattgctgaacctaacgctcttattggtttcgcaggtccgagagttattgaacaaacagtgagggagaagttacctgaaggttttcagaggagtgaatttctccaagagcatggcactatagatatgatagttgaaaggaaggaccagccagaaaaaatagcaaatattctcaaaatgcttggtttcagtgattatgcaaaaatttaat

SEQ ID NO: 319617 - DNA, 454 bp, Unknown
  Bacterial polypeptide expressing nucleotide sequence isolated from the Sargasso Sea
atgggtggctcaatggggaagtgtagttggcgagaaatttgttcaaggtattgagcaagcaattgagaacaagacaccatttatttgtttttcaacaagtggcggagcaagaatgcaggaatcaatggtttcccttatgcaaatggcaaaaacatctgctgcaattcagaaattaaaatcaaagaaactgccttatatatctgtaatggttgatccaatatttggaggagtatcagcaagcttagcaatgttaggtgacataaacatagcagagccaaaggcttttgttggttttgcaggccgaagagttattgaacaaactgtaagagttgagctacctgaagactttcaaaagtcagaattcttacttgaacacggagctatagatatgattgttcatagatcagaaataagaagcaaaataatcgggattttagataaaatatcaaaatga

SEQ ID NO: 319618 - DNA, 550 bp, Unknown
  Bacterial polypeptide expressing nucleotide sequence isolated from the Sargasso Sea
agaattaaggaagctaagaaaaatactggagagagtgaggctctattagtcggatttgggaagcttgatggaagactagttactgctgcagcatttgaatttaagtttatgggtggctcaatgggaagtgtggttggtgagaaatttgtccaaggtattgagcaagcaattgaaagcaagacgccatttatttgtttttcaacgagtggcggggcaagaatgcaggaatcaatggtttctctaatgcaaatggcaaaaacatctgccgcaattcagaaattaaaatcaaacaaattgccttatatatctgtaatggttgatccaatatttggaggagtatcagcaagcttagcgatgttaggtgatataaacatagcagagccaaaggcttttgttggttttgcaggccgaagagtaattgaacaaactgtaagagttgagctacctgaggactttcaaaagtcagaatttttacttgaacacggagctatagatatgattgttcatagatcagaaataagaagtaaaataatcgggattttagataaaa

SEQ ID NO: 319619 - DNA, 745 bp, Unknown
  Bacterial polypeptide expressing nucleotide sequence isolated from the Sargasso Sea
aatgtattttttagattttgaacaaccaattgctgaacttgaagcaaaaattgatgaattacgaagtgttgagagcgagcaagatgtaaatgttagtgatgaaatagcggtattaaaaaaacgtagcgatgacctgactcaatctattttttcatcattgacttcatggcaaatatcccaaatatcaagacacccaaaacggccttatactagagattatattgaacgaatttttgtagattttgaagaattgcacggggaaagatattttggcgacgatccggcaataatatgcggtattgggcgtcttggtaaacaatctgtagtaataataggtcatcagaaaggaagggatactaaggaaagaataatgcgtaattatggaatgccaaaaccagagggatatcgtaaagctttgcgtgtaatgcaattagctgaaagatttaatatgcccattttaacatttattgatacacctggtgcataccctgggatagaagcagaagagcgaggacaaagtgaagcaattgctaagaatttattagtaatgtcagaacttcaaaccccaataatttcaactgtaataggtgaaggtggttcgggcggtgcattagcaataggtgttgctgaccatttattgatgcttgaatatagtacatattctgttatttcacctgaaggatgcgcttcaattttatggaaaagtgcagataaagcaaaagaagcagctcaatcaatgggtata

SEQ ID NO: 319620 - DNA, 847 bp, Unknown
  Bacterial polypeptide expressing nucleotide sequence isolated from the Sargasso Sea
gctggagaccaagagccgcaagctcacccgggaaatttttgcctcccttgatgcctggcagatcacacagttggcgcggcacccgcaacgtcctcacaccctagactatatttcgcgggttttctcaaatttccaggagttatctggagatcggatgtaccgcgatgatccggcgatcgtcggcggccttgcccgcgttggtggcaaaggggtaatggtgattggccaccagaaaggccgcgacactaaggaaaaagtccgaagaaattttgggatgccgagtcctgagggctaccgcaaggcgcagcgccttatgaggatcgccgagaagttccgactaccggttatcacccttatcgacacaccgggtgcctatcccggtatcggggctgaggaacgtgggcagagtgaggctattgcccaaaatattgcaatgatggcaggtctgaaagtaccaattgtctcgattgtcattggtgaaggtggctccggcggagcgctcgcgattggcgtctgtgaccgcttggtgatgcttcagttcgccacctattcggttatcagtcccgagggttgcgcatccatcctttggaagagtgcggacaaagcccagaccgccgcgaccgcgatgaaaattacctctgagagtcttaaacagaacggactcgtcgacattgtggttcaggagccgttgggtggtgcacaccgtgatcccgatcaaaccgccgagcaactcagggttgtgatccaggagcagttgcaggccttcgactccctgacgaccgaagagttgttacgccagcggtatacgaggttgcgttcatttgggcggttcaaagacgagttctga

SEQ ID NO: 319621 - DNA, 720 bp, Unknown
  Bacterial polypeptide expressing nucleotide sequence isolated from the Sargasso Sea
catgagcaactggctggtagacaaactgatcccttcgatcatgcggtcggagacgcaaaagagctcggtccccgaaggcctttggcacaagtgcccctcttgcgaggcggttctataccgccctgagctggaaaagacgctcgatgtttgccccaagtgccagcatcacatgcgcatcgatgcccgtagccggctcgatatcttcctcgatgccgagggccgcgaagagatcgctgccgagctggagccggtcgaccgcctgaagttccgtgatagcaagaagtacaaggatcgcctctctgcagcacagaagcagaccggcgagaaagatgcgctgatcgcaatgagcggaaaggtcgtcaacatcccggtcgtggcttgtgcattcgaattctcgttcatgggtggctccatgggagcaatcgttggcgagcgtttcgtgcgggccgccaatgttgctcttgaaaagcgttgtccgctggtgtgcttctccgcgtcaggcggtgcccggatgcaggaggctctgatctccctgatgcagatggcaaagacttccgccgtgctggcccgcatgcgtgaagagggcctgccgtttatctccgtactgaccgatccggtctacggtggtgtgtctgcgagtctggcgatgcttggtgatgtgatcgttgccgagcccaaggcattgatcggcttcgccggcccgcgagtgatcgagcagac

SEQ ID NO: 319622 - DNA, 793 bp, Unknown
  Bacterial polypeptide expressing nucleotide sequence isolated from the Sargasso Sea
gattttgaaaagccaattgtcgagctcgaaagaagaattgaagagcttaaattgaccaatactgatgcaaatactgcaattgagttggatgatgaaattcatagacttcaaaagaagtgtgcatcgctaactaaaaaaatctttagtagtctcagtgaatggcaaattactcaactcgctagacaccccctaagaccaaaatccattcaagtgattgaagccatcagcaagaattttcaggaacttcatggagatagaatgtatgcagatgatgccgcaattatttcaggacttgccaaaatcgacagtaggtctgttatgtttattgcacaagagaaaggtgctaatacgaatgaaaagatgagaagaaactttggcatgccgagacctgaaggttatagaaaagcgcttagaatgatgaagttagcagaaaaatttcatattcctattgtcacaattatcgatacaccgggagcttttcctggcataggcgccgaggaaagaggtcaaagcgaagcaattgcaagaaaccttttcactttggcatctttaaagactcctattataaatttagtgcttggtgagggaggatctggaggtgctttggctattgggatgggcgacaaactcataatgcttgaatactctatttactctgttatttctccagaggcttgctcatctattttatggagaaccccagatgaaactgaaagagccgctgaagcaatgggtatttcatctagtcgactgaatgaactcggattgattgatgagatcattgaggaaccgc

SEQ ID NO: 319623 - DNA, 613 bp, Unknown
  Bacterial polypeptide expressing nucleotide sequence isolated from the Sargasso Sea
ttgttcagtaaaccgaaatattccaaggtaaacgtcaagtcccgagaaggggtacccaagggcgttttcacaaagtgtcccgagaccggagaaatggtctttgccaaggaattgaagaacaacctcatggtggtacccaagagcggttaccattttcctctttccgctcccgagcgcatcgcctcgctggcggacgaggggagcttcgtggagcacgattccgagttacagtctaccgacccgctcgacttcaagggccttgcttcctacaaggagaagcttgatcagaacaaggagaagtgcgggctgaccgatgccgtcgtttccggcgtggccaagatgggcgggagatgggtcagtctcgccgttatggattttcggttcctcggagggagcatgggttccgtggtaggggagaaaattacccgggcgattgagcgtggactggaaaactccatccccgtcatcatcgtttcagcctccggaggagcgcgcatgtacgagggtattctcagcctgatgcaaatggccaagacaagcgccgccttggccaagctttcggccaagggcatcccttatttttcagtgctaaccaacccgaccatggctgggg

SEQ ID NO: 319624 - DNA, 564 bp, Unknown
  Bacterial polypeptide expressing nucleotide sequence isolated from the Sargasso Sea
gtatgcctaaaccagaaggctaccgtaaagctttgcgtcttatgaagatggctgagcgctttaacatgcctatcatcacttttatcgatacgccgggagcgtatccaggtgttggcgctgaagagcgcggccaaagtgaagcaatcgcgaaaaatttattcgaaatggctgagcttactgttccaatcgtgtgtaccgtaatcggtgaaggtggttcaggtggtgcactagcgattggtgttggcgatcgcgttaatatgctccaatattctacgtactcagttatttcaccagaaggttgtgcgtctattttgtggaaaagcgcagaaaaagccccacttgctgctgaagcgatgggcgtaagtgcgccacagattaaagagctaggcctgattaacagtattgttgaagagcctttaggtggtgcacatcgcgatcacaatggcatggcggctaatttgaaggccgtgattaagcagcagcttaaccagcttaaagaactagataagactaaattgatggaagagcgttaccagcgtttaatgtcgtttggttattgctaat

SEQ ID NO: 319625 - DNA, 508 bp, Unknown
  Bacterial polypeptide expressing nucleotide sequence isolated from the Sargasso Sea
ggtgaattagatcagcgaaaagttattgttgctgcatttgagtttagatttatgggcggttcgatgggaagcgttgttggtgaaaaatttgttcaaggcatcaaaacagctataaaaaataaatatccatttatatgttttgcaacaagtggtggagcaagaatgcaagaatctatgatctcacttatgcaaatggcaaaaacctctgcagctattcagaaactcaaaaaagaaaaattaccatacatttctgttttagttgatccaatttatggaggtgtctctgccagtatagctatgttaggagatataaatattgctgagccaaatgccttgagtggatttactgggagaagggtaattgaacaaactgtaagacttgagttaccagacaattttcaaaaatcagagtacttattaagcaatggagcaattgacatgattgttcatagaaaaaacttaagatcaaaaattagcggaattttaaaaaaaatacataaaacttaat

SEQ ID NO: 319626 - DNA, 682 bp, Unknown
  Bacterial polypeptide expressing nucleotide sequence isolated from the Sargasso Sea
acgtataagcatttttcttgatcagggtgaacataaagagatgtttaacgatctatcaccgagagatatgcttaaatttaaagataaacaaaaatatcaggataaatttgagcaaacacaaaacaagactggcgagaaagatgcacttctagtttttacgggaaatctaaaaaaaatacctattgttgtttgcgcattcgaatattctttctttggtggatctatgggatcggttgtgggagagaagtttaatagagctgtaaacttagctatcgaactcagaaggcccttagtttgtttttcagcaagtggtggggctcgcatgcaagaatcacttttctcgttatttcaaatgtctaaaacaagtgctgcgcttgcaaaattatctgaagaagccattccatatatttctgttctaacggacccaactatgggaggagtatcggctagtctagccgttttaggagatattaatattgctgaacccaatgctcttattggtttcgcaggtccgagagtcattgaacaaacagtaagggagaagttacctgaaggttttcaaaggagtgaatttctccaagagcatggcactatagatatgatagttgagaggaaggaccagccagaaaaaatagcaaatattatcgaaatgcttggtttcagtgatcatgcgaaaatttaa

SEQ ID NO: 319627 - DNA, 859 bp, Unknown
  Bacterial polypeptide expressing nucleotide sequence isolated from the Sargasso Sea
catgccaagacgttatcttcttgattttgaaaaacctcttgtcgagcttgagaagcaaatagagcaaattagagaattagcaagagattcagaagtagatgttagtcaacagttactgcaactagaaacactcgctacaagaagaagagaggagatttttaggtccctaactcctgctcagaaaatacaggtagccagacatccacaaagaccaagtactttggattttattcaaatgttttgtgatgattggactgaattacatggagatagaaatggaggagatgatatggccttaattggaggtttaggttcgataaataatcaaccggtgcttttattgggtcatcagaaaggaagagatacgaaggaaaatgtagttagaaactttgggatggcaaaaccgggaggttatagaaaagctctaaggttaatgcagcatgctgatagattctcattgcctatccttacttttattgatacccctggtgcatatgctggcctctctgcagaagaacaaggtcaaggagaagccatagctagaaatctaagagaaatgtttgggtttcaagtcccaataattgccactattattggtgaaggagggtctggtggagctcttggaattggagtagctgataggctattgatgtttgaacacagtgtttataccgttgctagtccagaagcttgtgcctcaattctttggagagatgctgcaaaagcttctgaagctgcaacagcgttaaaaataactggacaagatcttcttgaattgggcgtaatagatgaggttttgtcagaacctgcaggtggtaataattgggctcctatagaggctggcaatactctaaaaggc

SEQ ID NO: 319628 - DNA, 532 bp, Unknown
  Bacterial polypeptide expressing nucleotide sequence isolated from the Sargasso Sea
tatgtttcacgattatctttcatttgaacaaccaattgcggaattggaagcaaaaattgacgaattgaggttggtgaactccgataatcgcattagcataaatgaggaaatagataacttactaatcaagagtgagagattgactgaaaaagtatattcaaatctaagtccatggcaggtttctcaagtagcgagacacccccttcgaccctataccttagattatataagacacatttttacggattttgaagagttgcatggggatcgagcctttggtgatgatcaatctttgattggaggccttgctaatctagagtccactcctgttatgttaatcggccatcagaagggtagaggtactaaagaaaaattaaaacataattttggaatgccacgccccgagggctatagaaaagcgcgtcggttgattaagctagcagagaaattcaagttaccaatacttacttttattgacacgccaggagcatatcctgggatggattccgaagaacggggcatcaatgaggcg

SEQ ID NO: 319629 - DNA, 678 bp, Unknown
  Bacterial polypeptide expressing nucleotide sequence isolated from the Sargasso Sea
atgataaagctataatttgtggcttcgccaagctagatgataaggcatttatgctaattggacatcaaaaaggaagagattcaaaagaaaaggtttatagaaactttgggatgcctaaacctgaaggttatcggaaagcacttagagcaatgaaactagcagaaaaatttggtataccagttctaacgtttatagatacaccaggcgcttaccctggaattgatgccgagtctagaaatcaaagtattgcaatcgcagataatttatatgaaatgtcaaaactaaagtgtccaattatctctgttgttatcggagaggggggatcaggtggagctctagcaattggagttgcagataagcttgcaatgcttcagtatagtatttattctgtaatcagccctgaaggttgtgcatctatattatggaaagatgcatccaaagctaatttagcagcagaagcattatcaattacatctgataaactacttaatcatgaattgattgatagaattattccagaaccattgggtgctgcacatagaaattacagcgcaatgtactcctcgttaaagtctaatattttagacatgctcaatgaggttaatgcggtctctcaatctgacctgttgaatgctagaaatactaagttaatgtcatatggacaatttgaatcttagt

SEQ ID NO: 319630 - DNA, 583 bp, Unknown
  Bacterial polypeptide expressing nucleotide sequence isolated from the Sargasso Sea
gataaattcaaactgtcacaagagaaaacaggtgaaaaagacgcacttttggtattcaaggggaacttaaaaacaatacctgtgatagtttgtgcttttgaatactctttttttggaggatctatgggttctgttgttggcgagaagtttattagggcagtaaagctgtctattgaattaaatagaccattaatatgtttctctgcaagtggcggggcaagaatgcaagaatccttattctcattatttcaaatgtcaaaaacaagtgctgcattagcagaattatcagatcatgcgataccatatatatctgtattaacagatcctaccatgggtggagtatcagctagtcttgcagtattaggcgacataaatattgctgaacctaatgccctcataggttttgctgggccgagagtgatagagcaaactgttcgagaaaaactgccagaaggttttcaacgtagtgaatttctacaagagcacggagctattgatatgataatagaaagaaaggaacagccagataagattgcaaatatattaagcattcttggtttccctaatgaaaagaagatttgat

SEQ ID NO: 319631 - DNA, 847 bp, Unknown
  Bacterial polypeptide expressing nucleotide sequence isolated from the Sargasso Sea
tctctacctacttgagctagagaagcatcacagcgtctgccccaagtgtgagcaccacctacgcttgacggcgcgcaaacgcttggactggttcctggacaaacaggggcgcgaagagatcgcggcagagatcgagccgaacgaccgcctgaaattccgcgattccaagaagtacaaagaccgtctgaccgctgcgcaaaaagagaccggcgagaaagatgcgctggtcgcgatgcgcggcgagctggaaggtttgccgatcgttgccgtggcattcgagttcactttcatgggcggctccatgggtgccgtagtgggcgagaaattcgttcgcgcggcgaccatcgccctcgaagagggcattccactggtctgctttgccgcatcgggcggtgcacgaatgcaagaagcgctgttctcgctgatgcagatggcaaaaacgtcggcagccctcgagaagctcaagcaggcgggcgttccctatatttcggtattgaccgatcctgtatttggcggcgtatcggcctctttggcgatgctgggcgacttgaacatcgccgagccgaatgcactgatcggttttgcgggcccccgagtgatcgaacagaccgtacgagagactttgccggaaggcttccagcgcagcgaattcttgctggagcacggtacggtcgacatgatcgttcaccgccacgacatgcgcgcacgggtaggcggcgtactgcgtaagctcacgcatcagagcgctcgcccggtaaacgatgaatcgtcagatgccgaggtggtagagccggtcgaaatgaagagcagttggccgatgccgctgaagcacctgccaaaagcacgg

SEQ ID NO: 319632 - DNA, 487 bp, Unknown
  Bacterial polypeptide expressing nucleotide sequence isolated from the Sargasso Sea
gatgtcagaatataatcctaactatctagatttcgaacaaccattgcttgatattgagaataaaataacagcaattaaaactagtgcaagtgcatctcaaaaagatttaaaaaaaattgataatcttaaaattgatttagataaaaatatttctaaaatattttcatctttatctgattggcaaatctctcaaattgctcgacatccattaagaccatatactctggactatattgaaaatatgttttctagttttactgaaatacatggtgacagaatgtttggagatgacaaagctataatatgtggttttgcaaagctcgatgataagccatttatgttaattggacatcaaaaaggaagagattcaaaagaaaaggtttttagaaactttggaatgcctaaacctgagggctatcgaaaagcactgagagcaatgaaattagcagaaaaatttaatataccaattctaacatttatagataca

SEQ ID NO: 319633 - DNA, 655 bp, Unknown
  Bacterial polypeptide expressing nucleotide sequence isolated from the Sargasso Sea
ggtggtattgcccgcctgggcgaccagccggtgatgatcatcggccaccagaaaggccgtgaagtgcgtgagaaggtgcgccgcaacttcggcatgccgcgcccggaaggctaccgcaaggcctgccgcctgatggaaatggccgaacgtttcaagatgccgatcctcaccttcatcgacacccccggtgcctacccgggtatcgatgccgaggagcgtggacagagcgaggccatcgcctggaacctgcgcgtgatggcgcgcctgaaaacgccgatcatcgccaccgtcatcggtgaaggtggttctggtggtgcactggccatcggtgtttgcgaccaactcaacatgctgcagtactccacctactcggtgatctcgccggaaggctgcgcctcgattctctggcgtaccgccgagaaggcgccggatgccgccgaagccatgggcatcaccgccgagcgtctgaaggatctgggcatcgtcgatcaggtgatcgccgaaccgctgggtggtgcgcaccgtgatccggccgcagcttccgagtcgatccgtcaggagctgatcaagcaactggccagcctgcagaagcacgacactgacgcgctgctcaagcgtcgttacgatcgtctgatgagctacggcatcgcctgag

SEQ ID NO: 319634 - DNA, 665 bp, Unknown
  Bacterial polypeptide expressing nucleotide sequence isolated from the Sargasso Sea
attaaatatattcttagatgatagctcatatgaagaaatagctgcaaatttaacaacaaaagatccactaaagtttaaagattcaaaatattacacatcaagagttaaagaggcagttgctgctacaggagagaaagaagcactcattgtggtaaaaggtaagcttgaaggtataagtgttgttgtagctgcatttgaatttaggtttcttggtggttcaatgggtagcgttgttggtgaaaaatttgttcaaggaataaatactgctattaaagaaaaagttccttttgtatgttttgcgactagtggtggtgcaaggatgcaagaatcaatgatttcattaatgcagatggcgaagacctcagcagcgatacaaaaattaaaaaaagaaaaattaccgtatatctctgttttaattgatccaatttatggaggtgtgtctgcaagtattgcaatgctaggtgatataaatattgcagaaccaaatgcattgagcggctttactggacgaagggtaattgaacaaactgtaagaattgaactgcctgataattttcagaaatcggaatatcttttaagcaatggtgctatagatatgatcgtccatagaaaaaatcttagatcaaaaataagcagcattttaaataaaatatataaagcataat

SEQ ID NO: 319635 - DNA, 655 bp, Unknown
  Bacterial polypeptide expressing nucleotide sequence isolated from the Sargasso Sea
aggaagggacacaaaagaaaatgtagtaagaaactttgggatggcaaaaccaggcggttacagaaaagctctcagattaatgcagcatgcgaatagattctctttgccaattcttacatttattgatactcctggagcttatgctggtttaaaagctgaagaacaaggacaaggggaagcgattgcaagaaatcttcgagagatgtttggattgaaagttccaattgtggctactgttattggagaaggaggttcaggcggtgcacttggaataggtgttgccgataggttactaatgtttgaacacagtgtttacacagttgctagtccggaagcatgtgcatcaattttatggagagatgctgcgaaggccccagaagctgcatcagcacttaaaatcacaggtaaagatttacttaaattaggaataatagatgaggtattaccagaaccctctggtgggaataattgggctcctttagatgctggcaatacactaaaagaggctattgagaaacatcttaattctttactgcaaatgcctgaagacgaattaattgaggaaagatacaaaaagtttagagttttaggtaaatttattgaagcaaataatattgaagagatttatagtgaaatcccccaaaaaactgaataa

SEQ ID NO: 319636 - DNA, 838 bp, Unknown
  Bacterial polypeptide expressing nucleotide sequence isolated from the Sargasso Sea
catgagctggctggacaaactgctgccgcccaagatccaacagaccgacccgtcgcagcgcaagggcattcccgaaggcctgtgggtcaaatgcccggcttgcgagtcggtgctgtatcggaccgacgtcgaggccaacctgcacgtctgcccgaagtgcgaccaccatatgcgcatcggcgcccgtgcccgcctggacgcactgctggacgccgaaggccgctatgagctgggccaggagatcgttcccgtcgacgccctgaagttcaaggacacgaagaagtatcccgaccgcatcaaggcggcgatggacgacacgggtgaaaccgacgccatggtcgtgatgggcggtgccattcacgcgctgccggtcgttgtggcctgcttcgagttcgaattcatgggcggctcgatgggctccgtggtgggcgagcgcttcacgcgcggcgcgcagatggccctggagcaaaaggtgccgttcatctgcgtgtcggccactggcggtgcgcgcatgcaggaaagcctgctgtcgctcatgcagatggccaagacgacgtcgatgatccagaagctggcggaagccaagctgccgttcatcagcgtgctgaccgatccaaccatgggcggcgtgtccgccagcttcgccttcatgggcgacgtggtgattgccgagccgaaggccctgatcggctttgccgggccgcgcgtcatcgagcagaccgtgcgcgagaagctgccggaaggtttccagcgcgctgaattcctgctgcagaagggggccatcgacatgatcgtcgatcgtcgcaacatgcgccgcgagatcgccgagcttctggcg

SEQ ID NO: 319637 - DNA, 847 bp, Unknown
  Bacterial polypeptide expressing nucleotide sequence isolated from the Sargasso Sea
atgaattggttaagaaggttaataccttcaatcggaacatttaagtcaaaaagtaaagttccagacggtctatgggtttcatgtaaaaaatgtgaatctgtcttatatgttcctgaattagaaaaatctttatatgtttgtcccaaatgtggctatcatatgagaattggtgcaagaaaaagattagacatttttttagataacagctcctatgaagaaattgcaccaaatttaacgacaaaagatcctttaaggtttaaagactcaaaatattacacatcgagagttaaagaagctattgctgctacaggagagaaagaagcactcattgtggtaaaaggtatgcttgaaggtgtaaatattgttgtagctgcatttgaatttaggtttcttggtggttcaatgggtagcgttgttggtgaaaaatttgtccaaggaataaataccgccatcaaagaaaagattccttttatatgttttgctactagtggtggtgcaaggatgcaagaatcaatgatttcattaatgcagatggcgaagacttcagcagcaatacaaaaattaaaaaaagaaaaattaccatatatctctgttttaattgatccaatttatggaggtgtgtctgcaagcattgcgatgctaggtgatataaatattgcagaaccaaatgcattgagtggttttactggacgaagggtaatagagcaaactgtaagaattgaattgcctgataattttcagaaatcagaatatcttttaagcaatggtgctatagacatgatcgtccatagaaaaaatcttagatcaagaataagcagcattttaaataaaatatacaaagcataat

SEQ ID NO: 319638 - DNA, 406 bp, Unknown
  Bacterial polypeptide expressing nucleotide sequence isolated from the Sargasso Sea
gaaagtgccgtttatctgctttaccgcttcgggcggcgcgcggatgcaggaaagcctgctttcgctgatgcaaatggcgaagaccacggcaatgctgaccaagctcgccgaagccaagctgccgttcatttccgtgctgaccgatccgaccatgggcggcgtgtcggcgagtttcgcgttcctgggcgacgtggtgattgccgagccgaaggcgctgatcggcttcgccggcccgcgcgtgatcgagcaaaccgtgcgcgaaaagctgccggaaggcttccagcgtgccgagttcctgctgacgaagggcgcggtcgacatgatcgtcgaccgtcgcaagctgcgtgaagaaatcgcgcaattgatggcgctgttgagccatcagccggctgacgcggtggcgtaa

SEQ ID NO: 319639 - DNA, 874 bp, Unknown
  Bacterial polypeptide expressing nucleotide sequence isolated from the Sargasso Sea
tatgagttggttagaaaaaattctgcccagaacttcgtcttcatcccgtcgtaatattcctgaaggggtctggactaaatgtacctcttgtgacgctgtattgtacaaagcagaactggatcggaacttaggtgtttgtcctaaatgtgacaaccatatgcgtatcagtgccagagaccgcatcaacaattttcttgatacaggtggtatggtcgaattggctgcagagctggaacctcaggatctgctgaaatttaaagacagcaaaaaatacaaagaccgtattgttgctgcacaaaaagaaaccaatgaaaaagacgctatggtggtgatgcgtggtactttattgggcatgcctgttgttgtcgcttcctttgaatttgcctttatgggcggctctatggcgtctgttgtaggagctaagtttgtcaaaggtgtggagtacgcgttagaacacaaagtaccttttatctgtttctctgccagtggtggcgcccgtatgcaagaagctttactgtctttaatgcaaatggccaaaaccagcgcggctttagctaaattgagcgaagcaggtttaccctatatttctgtgttgaccgaccctaccatgggtggtgtgtctgcgagtctggctatgctgggcgatttaaacattggtgagccaaaggcgctgataggttttgccggtccccgtgttattgaacagacagtccgcgaaaaattacctgaaggtttccagcgcagtgaattcctgctggaacacggtgctatcgacatgattgttgaccgccgccaaatgcgcgatacaattgcccgacttgtggctaaattcatgcgatggccagctcctgccaaggaacaccgcgtcgcctaa

SEQ ID NO: 319640 - DNA, 874 bp, Unknown
  Bacterial polypeptide expressing nucleotide sequence isolated from the Sargasso Sea
attgagttggttagataaaatattaccttcaagaattagagcaaaaagagagggcaaggcatcagtgccagaaggattatggcataagtgttcaaactgtgaaacagtaatatatagagctgagtacgagaaaaatttaaatgtctgtcctaaatgcaaccatcatggaaggatatcagctagaaaaagagctgacataattttggataaagaaaataaaacagaaatcctcactgatataaagcctgttgatatgttgaatttcaaagataaagaaaaatatagagataaattacaaagtacacaaaaaaagactggtgaagatgatgcgctagttgtttataaagctacaatgaataatcagcctgtgattgcatgttttttcgagtattcattctttggtggttcaatgggctctgttgtgggggaaaaatttactaaagctgtttataaatgtttagaatcatattcttctttaatatgtttttctgcaagtggtggagcaagaatgcaagaatcattattctccctttttcaaatggctaaaacaagttgtgcgctgaatgaattatcaaaaaaaagattaccatatatatctgtactcactgaccctactatgggaggagtatcagcaagtctagctatgctaggagatataaacatagctgaaccgaatgcattaattggattcgcaggaccaagagttattgaacaaacagttggtgaaaagttaccagagggcttccagcgtagtgaattcctcagagatcatggcgcaatagatttaatattaagtcgaaaagatcaaaaaaataagatttctgacattcttagtactttgacgacacatacattagatggcaacacaacttaa

SEQ ID NO: 319641 - DNA, 874 bp, Unknown
  Bacterial polypeptide expressing nucleotide sequence isolated from the Sargasso Sea
atgagttggttagataagatattaccttcaagaataagagctaataaagaaaacaaaggctcagttccagatggactttggcataaatgtccgaattgtgatgcagtaatctatagagctgagtatgaaaaaaacctaaatgtatgtccaaaatgtaatcatcatggtcgtatatctgcgcgtaaaagagctgatatagttcttgatgttgaaaatagggttgaggtattaaataacataatgccagttgatatgcttaattttaaagataatgaaaaatataaagacaagcttacttcaactcaaaaaagaacaggtgaaaaagatgctatgttagtatacaaggggagtattaataaaatccctgttgtaacttgtttttttgaatattcattttttggtggatcaatgggatcagtcgttggtgaaaaatttacttcagcagtcaaaatttgtatagaggaagaaagaccactcatttgtttttctgccagtggaggcgcaagaatgcaagagtctcttttctctctatttcagatggcaaaaacaagtgctgccttaaataatttatcagacgcaaaacttccttatatatcaatgttgactgacccaaccatgggaggtgtatcagctagtttagctatgttaggtgatattaacattgcggaacctaatgcactaattggatttgctggaccacgtgtaatagaacaaactgttggagaaaagttacctaaaggttttcagaaaagtgaatttttacaggatcatggttctatcgattttatactcgatagaaatagtcagaaggacaaactagctcagattatatcatcattaatgagtaaccacgaaagtgaaaaagcatcctagc

SEQ ID NO: 319642 - DNA, 622 bp, Unknown
  Bacterial polypeptide expressing nucleotide sequence isolated from the Sargasso Sea
gatgatcatcggccaccagaagggccgtgaggtgcgtgagaaggtgcgccgcaactttggcatgccgcgcccggaaggctaccgcaaggcctgccgcctgatggaaatggccgagcgcttcaagatgccgatcctcaccttcatcgacacccccggcgcttacccaggtatcgatgccgaggagcgtggccagagcgaggccatcgcctggaacctgcgcgtgatggcgcgcctgaaaaccccgatcatcgccaccgttatcggtgaaggtggttccggtggtgcgttggccatcggtgtctgcgaccagctcaacatgctgcaatactccacctattcggtgatctcgccggaaggctgcgcctcgattctctggcgcactgccgagaaggcgccggacgccgccgaggccatgggcatcaccgccgagcgcctgaaggatctgggcatcgtcgatcaggtcatcgccgagccactgggcggcgcgcaccgcgacccggcggcggcttccgagtcgatccgccaggagctgaccaagcaactggccagcctgcagaagcatgacaccgagacgctgctcaagcgtcgttatgaccgtctgatgagctacggcatcgcctga

SEQ ID NO: 319643 - DNA, 946 bp, Unknown
  Bacterial polypeptide expressing nucleotide sequence isolated from the Sargasso Sea
aatgaaaaaacactatttatcgtttgaaaaaccattaaaagatttagattttgagattgaaaaattatctaattctgaatctgataataccaaactaaatcaattaattgatgaaagaaaagaattagaaaaagaaattttttcagatttatcttcttgggaaactgttcaattggctagacacccaaatagaccatatactctagattatataaatgcatggtgtgataattttactgagttacatggtgataaagctttttcagatgataatgcagttgtttcaggaataggaattattgatggtttgaaagttgcaattataggtcaacaaaagggaagaaatacaaaagaaaatatttttagaaattttggaatgatgaaacctgagggttatagaaaagcactaagagtaatgaaattggctgaaaaatttaaattaccaattgttactttgattgatactcctggtgcagatcctggtattggagcggaagaaagaggtcaaggatatgcaatcgctaataatcttttcgaaatggcatcaataaaaacacaaattttgtcaatagttattggagagggtgcaagcggtggtgctttaggaatcggtttatgtgataaaatgataatgctagaacatacatggttttctgtaataagccctgaaggttgtgcttcaattttatggaaagattcttctaaggctcccgaagcagctgaatcattaaagctcacacctaaagatcttgtagagcataatatttgtaatatggttgtttatgaaccacctggaggagctcacagacattttgatgaaactgctgatattttgaaaaaatcaattttaagtgaaataaaagaattaagagaaaatgttaatgacaattttcttgactatagagtatctagatatgataaacttggagtatttagagaggattaa

SEQ ID NO: 319644 - DNA, 853 bp, Unknown
  Bacterial polypeptide expressing nucleotide sequence isolated from the Sargasso Sea
atgaattggcttacaagattaattccgtcaataggaaagagttcttccaaatcaaaaaaaagtaagattcctgatggtgtttggacatcatgtccttcatgcgaatcagcactttataaacctgagttacaaaaaaccttatatgtgtgtccaaaatgtgatcaccacttaaggatcggtgccagaactaggtttaatattttttttgataatggcaatttcactgaaattgcatcaaatgttgaaacaaatgatcctcttggtttcaaagacgttaaggcatatcctgcaagaattaaagaagcaaaaaagaatactggagaaagtgaagctttattggttggatttggcaaacttgatggacgcttggtaactgctgcagcatttgaatttaagttcatgggtggctcgatgggaagcgtggttggagagaaatttgttcaaggtattcagcaggcaatagagactaatacgccatttatttgtttttcgacaagtggtggagcaagaatgcaggaatcaatggtttctcttatgcaaatggcaaaaacatctgctgcaatacagaaattaaaatcaaataagttgccttatatttctgtaatggttgatccaatatttggaggagtatcagcaagcttagcaatgttaggcgatatcaacatagcagagccaaaggcttttgttggttttgcaggaagaagagtaattgagcaaacggtaagagttgaactgcctgaagacttccaaaaatctgaatttttacttgagcatggagcagtagatatgattgttcatagatcagaaataagaagtaaaataattggaattttagataaaatatcaaaatgaa

SEQ ID NO: 319645 - DNA, 334 bp, Unknown
  Bacterial polypeptide expressing nucleotide sequence isolated from the Sargasso Sea
atgagtatacagtttttggactttgaacagccaatagccgaactagaagcaaaaattgaagagcttaggttggtgaatcaaggtggcgagtttgacgttggtattgaagaagaaatcaataagcttcgcggtaaaagcgcagagctgactaaaaagatcttttctgatcttggcgcatggcaagtttcccaacttgcacgtcacccaatgcgtccatacacgttagattacattcctcgtatttttaccgaattcgacgagcttgctggcgaccgcgcgtttgctgacgataaagcgattgttggtggcccagcaatgctggatgatcagccgg

SEQ ID NO: 319646 - DNA, 838 bp, Unknown
  Bacterial polypeptide expressing nucleotide sequence isolated from the Sargasso Sea
atggcgtggtttaaacgtgaaaaacaaaagatagctcctatagaaaaaaaaggagttcctgatggattatgggtaaagtgtcctacttgtagtgaatttctctataaaccagagttggataaatcactatcagtctgccgccattgctctcatcattttcgtattgatccaaagtcatatcatgaccttttacttgataaaggatcttcccaagaattgtttacaaacattagatctaaagattttttaggttttaaagcagaaaagaaatataaagatcaattaaatgatgcatcaaagaaaactggatataatgatgcgataaatacatacactggtacaataaaaagtaaaaaaataatacttggtataatgaattttgcttttatcggtggtagtatgggatcagtagttggagaaaaagtatctaggatgattgatcatgcccataaaaataaattacctataattttagtgtgtgcttcgggtggtgcacgtatgcaggaaggagcaatatcattgatgcaattagctaaaacaagtgcaaaattagcacagttctcagaaggtggaggtttatatattcctattctaactgatccaaccactggaggtgttaccgctagttatggtatgcttggagatattatattggctgaaccaggtgctcttataggttttgctggtccaagagtaattaaacaaaccattggtcaggatttgccggaaggttttcaacgaacagagtttttaaaagaaaaaggttttgtcgatcatatagttactagggaaaaaatgaagttaactttgtataacattttaacaatattaacatgaa

SEQ ID NO: 319647 - DNA, 973 bp, Unknown
  Bacterial polypeptide expressing nucleotide sequence isolated from the Sargasso Sea
catgaagaccacgtttctggatttcgaacagccgatcgccgaactcgaggccaagatcgaagagctgcgattcgtgcaggacgactcggctgtcgacatttcggaagaaatcgagcggttgtcgaagaaaagccagcaactgacgaaagacctctacgcgaacctgtcgccgtggcaggtctcgcagatcgcgcggcatccgcagcgtccgtacacgctcgattacgttgcggagctgtttaccgattttcacgagctgcacggcgaccgcgcattcgcggacgacgtgtcgatcgtcggcggcctcgcgcgcttcggcggccatccgtgcatggtgatcggtcaccagaagggccgcgacacgaaggagcgcgccgcgcgcaacttcgggatgccgcgtccggaaggctatcgcaaggccgaacgcctgatgcgtctcgccgagaagttcggtctgccgatcttcacgttcgtcgacacgccgggcgcgtacccgggcatcggcgcggaagagcgcggccagtcggaggcgatcggccgcaacctttacgtgatggccgaactgaagacgccgatcatcacgacggtgatcggcgagggcggttcgggcggcgcgctcgcgatcgcggtggccgacaccgtgatgatgctgcaattctcgacctactcggtgatctcgccggaaggctgtgcgtcgatcctgtggaagagtgccgcgaaggcgccggaagcagcggaagcgctgggcctgaccgcgcaccgcctgaaggcgctgggcctgatcgacaagatcatcaacgagccgctcggcggcgcgcatcgtgatccgaagggcatggccgcgctgctgcgccgtgcgctggccgattcgctgcgccagttccaggggatgagcatcgatgcgctgcgcgagcgccgcttcgagcgcctgatggcctacggcaagttcaaggaaaccacgccgggcgcatga

SEQ ID NO: 319648 - DNA, 955 bp, Unknown
  Bacterial polypeptide expressing nucleotide sequence isolated from the Sargasso Sea
ttggattttgtagatttcgagctgcccattatggatttagaggcgaagattgaagagctatgtctggttgaggggaataatgatttaggtttggcgtcagaaatagataatctacgaaaaaaatctgaggctctcactagagaaatattttcgtcattaaaggcgtggcagatttcgaagatagcccgtcatccgaagcggccttacacgatggattacgttaaattggttttcgaagaattcgtagaatttcatggtgatcgtgtatttgccgatgactctgctatgatttgcgggttgggaactatcgaatccaggaatttggtgtttattggccatcagaaagggcggggtactaaagagaatttagcgcgaaactttggtatgcccaaaccagaagggtaccgaaaagctttgagggcgatgaaactggctgagcaatttaagcttccactactaacttttattgataccccaggtgcttatcctgggattggcgcggaggagcgagggcagagcgaggctattgctactaacctcagaacgatgtccaatctacgtgtgccgatagtgtccgtggtcataggagagggcggttctggcggagcgctggccattggtatgggtgataaaattcttatgaaacaatactccacttattcggtcatttcgccagaaggttgcgcttctatactatggaaaagtgccgatgccgcgaaggatgcagctaatgctatgcacataacagccgatcacctctttaaattagggattgtagacgaaatcatagaggaaccccttggaggggcccatagaaatgtagaggctgctgctcagaatttgaagggggcaattttggctagtttcgatgagctgcgctctgtagagaaaaatgaattgattgacagaagaaggaagaagttttctgccatcggagagttttcggaaaattaga

SEQ ID NO: 319649 - DNA, 583 bp, Unknown
  Bacterial polypeptide expressing nucleotide sequence isolated from the Sargasso Sea
aaaattaagcgtaacttcggtatgcctaaaccagaaggttatcgtaaagccctgcgtcttatgaagatggctgagcgctttaacatgcctatcatcacttttatcgatacgcccggagcgtatccaggtgttggtgctgaagagcgcggccaaagtgaagcaatcgcgaaaaatttattcgaaatggctgagcttactgttccaatcgtgtgtaccgtaatcggtgaaggtggttcaggtggtgcactcgcgattggtgttggcgatcgcgttaatatgcttcaatattctacgtactcggttatttcaccagaaggttgtgcgtctattttgtggaaaagcgcagaaaaagccccactcgctgctgaagcgatgggcgtaagtgcgccacaaattaaagagctaggcctgattaacagcattgttgaagagcctttaggtggtgcgcatcgcgatcataatggcatggcggctaatttgaaggcggtcattaagcagcagcttaaccagcttaaagagctagataagactaaattgatggaagagcgttaccagcgtttgatgtcgttcggttattgctaag

SEQ ID NO: 319650 - DNA, 964 bp, Unknown
  Bacterial polypeptide expressing nucleotide sequence isolated from the Sargasso Sea
atgaatgaatatgacccaaattatcttgattttgaacaaccaatcttagaacttgaagctaagatcaaaaaaattcatgatgatcctgagaaaacagccaaaagtgacaagactctcgacaaattacaaatagaacgagataatttaattagtaaaatattcaataatttatcagactggcagatttcacaagtagcaagacacccgcttagacctcacacattagattatattccaaatatttttgataattttactgagcttcacggagatagaatgtttggagatgattcagctattgtcactggtcttgcaactatagataattataagtttgtgctgataggacatcaaaaaggtagagatgctaaggagaaagtaaaacgtaattttggaatgtctaaaccagaaggttatagaaaagcattaagaataatgaggttggcggaaaaatttagtttaccaattttaacttttatcgacactccgggagcttacccgggtattgatgcagaatctagaaatcaaagtcaagcaattgccgagaatttatatgtaatgtcaaatttaaaagttcctattatatctgttgtaataggagaaggaggctctgggggagcattggcaatcggtatagctgatagactatgcatgttacagaatagtatatattctgtaattagtcctgaaggttgcgcgtcaatactctggaaagattcaaaaaaagcttcacatgcagctgaggcattgtgtataacttcgaataaacttcttaaatttaatttgattgacaaaattattcctgaaccgctaggtggagctcaccgagatatagtagcgactagttcttcgttgaaaatgaatatcctctcaataattgatgaattaaataattatcctgtagatcagttattatctgaaagacataataaaatccaatcatatggtgagtttgaaaaataat

SEQ ID NO: 319651 - DNA, 847 bp, Unknown
  Bacterial polypeptide expressing nucleotide sequence isolated from the Sargasso Sea
catgaactggttaagaagattgataccatcaattggtactttcaaatccaaaagtaaagttccagatgggctatggagttcctgtaagaaatgtgagtcagtcctctatgctcctgaattagaaaaatctttattcgtatgtccaaaatgtgattatcatcttcgaattggagccagacaaagactagacatgtttctagacaatagcaattactctgaaatagcaccagatcttactactaaagatcctttaaaatttaaagattcaaaacattacacttcaagaattaaagaagccgtagcttcaactggtgaaaaggaggcgcttttagttgtttcgggtgaattagatcagcgaaaagttattgttgctgcatttgagtttagatttatgggtggttcgatgggaagcgttgttggtgaaaaatttgttcaaggcatcaaaacagctataaaaaataaatacccatttatatgttttgcaacaagtggtggagcaagaatgcaagaatctatgatctcacttatgcaaatggcaaaaacctctgcagctattcagaaactcaaaaaagaaaaattaccatacatttctgttttagttgatccaatttatggaggtgtctctgcaagcatagctatgttaggagatataaatattgctgagccaaatgccttgagtggatttactgggagaagggtgattgaacaaactgtaagacttgagttaccagacaattttcagaaatcagagtacctattaagtaatggagcaattgacatgattgttcatagaaaaaacttaagatcaaaaattagcggaattttaaaaaaaatacataaaacttaa

SEQ ID NO: 319652 - DNA, 571 bp, Unknown
  Bacterial polypeptide expressing nucleotide sequence isolated from the Sargasso Sea
catgcaaatagattctctttaccaattcttacatttattgatactcctggagcatatgctggtttaaaagctgaagaacaaggtcaaggtgaagcgattgcaagaaaccttcgagagatgtttggattgaaagttccaattgtggctactgtcattggagaaggaggttcaggaggggcacttggaataggtgttgccgataggttactaatgtttgaacatagtgtttacacagttgctagtccagaagcatgtgcatcaattttgtggagagatgctgcgaaggcaccagaagctgcatcagcacttaaaattacaggtaaagatttacttaaattaggtgtaatagatgaggtattaccagaaccttctggtgggaataattgggcgcctttagatgctggcaatacactaaaagaggctattgaaaaacaccttaatgctttactgcaaatgcctgaagacgaattaattgaggaaagatacaaaaaatttagggttttaggtaattttatcgaagcaaataatattgaagagatttatagtgaaatacctcaaaaaactgaataaa

SEQ ID NO: 319653 - DNA, 850 bp, Unknown
  Bacterial polypeptide expressing nucleotide sequence isolated from the Sargasso Sea
aatgaattggcttacaagattaattccgtcaataggaaaaagctctacaaaatcaaaaagtaagattcctgatggtgtttggacgtcctgtccttcatgtgaatcagcactttaccagccagagttacaaaaaaccttatacgtatgtccaaagtgcgatcatcacttaaggattggtgctagaactagattcaatattttctttgataatggaaatttcactgaaatcgcatcaaatgtcgaaacgggagatcctcttggctttaaagacgtcaaagcatatcctgcaagaattaaagaagctaagaagaatactggagagagtgaggctctattggttggatttgggaagcttgatggaagactagttactgctgcagcatttgaattcaagtttatgggtggctcaatgggaagtgtagttggtgagaaatttgttcaaggtattgagcaagcaattgaaagtaagacaccatttatttgtttttcaacaagcggcggtgcaagaatgcaggaatcaatggtttctctgatgcaaatggcaaaaacatctgctgcaattcagaaattaaaattaaataaactgccttatatatctgtaatggttgatccaatatttggaggagtatcagcaagcttagcaatgttaggcgatataaacatagcagagccaaaggcttttgttggttttgcaggccgaagagtaattgaacaaactgtaagagttgagctgcctgaagactttcaaaagtcagaatttttacttgaacatggagccatagatatgattgttcatagatcagaaataagaagtaaaataattgggattttagataaaatatcaaaatga

SEQ ID NO: 319654 - DNA, 946 bp, Unknown
  Bacterial polypeptide expressing nucleotide sequence isolated from the Sargasso Sea
gatgaaaagatattatttaccatttgaaaaaccgctaaaagatttagattttgaaattgaaagattgacaacatccgaatctgattcaaaacaattaaaagatttaattgttgaaagggaaaatttggaaaaagaaatttttgcagatttatctccttgggaaactgtccaactagccagacatccaaatagaccttatacccttgattacatcaacgcttggtgtgataatttcacagaattacatggagacaaagctttttcagatgacaacgctgttgttgcaggaattggaatcattgaaggaatgaaggtcgccataattggtcaacaaaaaggaagaaacaccaaagataatatttttaggaattttgggatgatgaaacctgagggctatagaaaagcattaagagttatgaaattagctgagaagtttaaattacctatcattactttgattgacactcccggcgctgacccaggaattggagctgaagaaaggggacaagggtatgctatagcaaataatctttttgaaatggcttcaattaaaactcaaattttatcaattgtaattggagagggagctagtggtggtgcattaggaatcgggctttgcgataagatgattatgctagagaatacatggttttctgttataagtccggaaggttgtgcatctattttatggaaagattcctcaaaagcaccagaagctgctaaatccctaaagcttactccaaaagatttgatggaacatgatatttgtaatatgattgtctacgagccttctggcggggcacacagacattttgattcaaccgcagatattcttaaggaaacaattttaagtgaaataaaagaactgcaaaaaaacttgagcaatgatttcttagaatctagagtttcgagatatgataagcttggtgtttttcgagaagattaa

SEQ ID NO: 319655 - DNA, 850 bp, Unknown
  Bacterial polypeptide expressing nucleotide sequence isolated from the Sargasso Sea
atgaattggcttacaagattaattccgtcaataggaaaaagctcttcaaaatcaaaaagcaagattcctgatggtgtttggacttcctgtccatcatgcgaagcagcgctttaccaacccgagcttcaaaaaactttatatgtctgtccaaaatgtgaccatcatcttaggattggtgcgaggacaagattcaacatattttttgataatgggaattttactgaggtagcttctaacattgaaacaaaagatcctttaggctttaaagatgtcaaaagatatcctgcaagaatcaaagaagctaaaagaaataccggtgaaaatgaagctctgttagtaggatttggaaagcttgatggaaggcttgtaacagctgctgcctttgagtttaaatttatgggcggctctatgggaagtgtggtaggtgagaaattcgtgcagggtatagagcaggctattgaaagaagcactccatttatatgtttttctacaagtggcggagctaggatgcaagaatcaatggtctcccttatgcaaatggctaaaacgtctgcagctattcagaaactaaagtcagaaaaattaccatatatatctgtaatggttgatcccattttcggaggtgtttcagcaagcttagctatgttaggggacataaatatggctgaacccaaagcatttgttgggtttgcaggcaggagagtcatcgagcagactgttaaggtagagctaccggaagatttccaaaagtcagagttcttgcttgagcatggcgcaatagatatgatcgttcatagatcagaaataagaagcaaaattataggaattttagataaaatatcaaaatgaa

SEQ ID NO: 319656 - DNA, 527 bp, Unknown
  Bacterial polypeptide expressing nucleotide sequence isolated from the Sargasso Sea
tgaagctttactggttggatttggcaaacttgatggacgcctggtaactgctgcagcatttgaatttaagttcatgggtggctcgatgggaagcgtggttggtgagaaatttgttcagggcattcagcaggcaatagagactaatactccatttatttgtttctcgacaagtggtggagcaagaatgcaggaatcaatggtttctcttatgcaaatggcaaaaacatctgctgcaatacagaaactaaaatcaaataaattgccttatatttctgtaatggttgatccaatatttggaggagtatcagcaagcttagcaatgttaggcgatatcaacatagcagagccaaaggcttttgttggttttgcaggaagaagagtaattgaacaaaccgtaagagttgaattgcctgaagacttccaaaaatctgaatttttacttgagcatggcgccatagatatgattgttcatagatcagaaattagaagtaaaataattggaattttggataaaatatcaaaatgaa

SEQ ID NO: 319657 - DNA, 874 bp, Unknown
  Bacterial polypeptide expressing nucleotide sequence isolated from the Sargasso Sea
tatgagttggttagaaaaaattctgcccagaacttcgtcttcatcccgtcgtaatattcctgaaggggtctggactaaatgtacctcttgtgacgctgtattgtacaaggcagaactggatcggaacttaggtgtttgtcctaaatgtgacaaccatatgcgtatcagtgccagagacagattaaacagtttccttgataccggtggtatggtggaactggctgcagagctggaacctcaggatctgctgaaatttaaagacagcaaaaaatacaaagaccgtattgttgctgcacaaaaagaaaccaatgaaaaagacgccatggtggtgatgcgcggcactttattgggcatgccagtggttgtggcttcgtttgaatttgcttttatgggcggctcaatggcgtctgtagtaggtgcaaagtttgtcaaaggtgttgaatacgcccttgaaaacaaagtgccttttatctgtttctctgccagtggtggcgcccgtatgcaagaagctctattgtctttaatgcaaatggccaaaaccagcgctgctttggcaaaactgagtgaagccggtttaccatatatctctgtgctgaccgacccgactatgggtggtgtatctgccagtctggcgatgctgggcgatttaaacattggagagccaaaagctctgatcggttttgccggcccccgtgttatcgaacagacagtacgtgaaaaattacctgaaggtttccagcgcagtgaattcctgctggaacacggtgctatcgacatgattgttgaccgccgccaaatgcgcgatacaattgcgcgacttgtggctaaattcatgcgatggccagctcctgctaaggaacaccgcgtcgcctaa

SEQ ID NO: 319658 - DNA, 847 bp, Unknown
  Bacterial polypeptide expressing nucleotide sequence isolated from the Sargasso Sea
catgaattggttaagaaggttaataccttcaattggcacatttaagtcgaaaagcaaagttccagacggtctgtggagttcttgtaaaaaatgtgagtcagttctctatgctcctgaattagaaaaatctttatatgtctgcccaaaatgtgattatcacttaagaattggagctagaaagagattgaatatatttttagatgatagttcgtatgaagaaattgctgcaaatttaactactaaagatcctttaaagtttaaagattcaaaatattacacatcgagagttaaagaagctgttgctgctacaggagagaaagaagcactcattgtggtaaaaggtaagcttgaaggtgtaagtattgttgtagctgcatttgaatttaggtttcttggtggttcaatgggtagcgttgttggtgaaaaatttgtccaaggaataaataccgccattaaagaaaaggttcctttcatatgttttgctactagtggtggtgcaaggatgcaggaatcaatgatttcattaatgcagatggcgaagacttcagcagcaatacaaaaattaaaaaaagaaaagttaccatatatctctgttctgatagatccaatctatggtggtgtgtctgcaagtattgcgatgcttggcgatataaatattgcagagcctaatgcattgagtggcttcacaggccgacgagtaatagaacaaaccgtaagaatcgaactgcctgataattttcaaaaatcagaatatttgttaagcaatggtgcgatagatatgatcgtccacagaaaaaatttaaggtcaaaaattagtagcattctaaacaaaatttacaaatcataa

SEQ ID NO: 319659 - DNA, 856 bp, Unknown
  Bacterial polypeptide expressing nucleotide sequence isolated from the Sargasso Sea
atggctacttacttagaatttgaagaaccaataaaattgcttgaggaacaaattacacaagctaaagagattagttcaaatacaggagttgatatgagtgacaatattaaacaacttcaaaaaaacttaacagataaaacaaaagaaattatttctaacctaactccttggcaaagggttcaattatcaagacatccagatagaccatacacaatggcctacattaatgcattaacaaatggcgaatttcaagaacttcatggagatcgaaatgttaaagatgacaaagcaatggttggaggctttggcttaatggatgacagaagcattatgtttattggtcaacaaaaaggaatcaatacaaaaatgcgtcaattcaggaactttgggatgcctaatccagaaggttatagaaaagcgcttcgcttaatgaagttggctgaaaaatttaacaaacctattgtaacatttatagatacacctggtgcttttcccggtctagaagcagaagaaagaggtcaaggagaagctatagctagaaatatatatgaaatgatgcgccttaaagtacctgttatatgtattattattggagaaggtgcatcaggaggggctcttggaattggtgtaggtgatcgagtcatgatgctcgaaaatacatggtactctgttatttctccagagtcttgctcatcaattttatggcgttcatgggatttcaaagaaaccgctgcagatgcattaaaactaacctctgcccacatgaaaaagttatcaatagttgatgaagtcattaaagaacctatacaaggagctcatcgaaataaggaagagatgtttagaagagtgcgcaaga

SEQ ID NO: 319660 - DNA, 718 bp, Unknown
  Bacterial polypeptide expressing nucleotide sequence isolated from the Sargasso Sea
tccaaaatgcaatcatcatatgaaaattgccgcacgtagtcgtctccaatattttttagatgaagaatataaaaaggagattggcattaatattaaacctattgacgtacttaaatttcgtgatacaaagcgttacaaagatagattaagtcaggctaaaaaaaatacaggagagaatgacgcaatagttgtcatgtcaggtaatttaaaaggacttccagttgtcgtttgtgcgtttgagtttggctttatgggcggctcgatgggttcagttgtaggagaaaaattcgttcttggtgttgaaaaagctattgaattaaatgcatccttaatttgtttttcatcaagcggcggtgcgagaatgcaagaggctttattctccttaatgcaaatggcaaaaacagctgcggcacttgctaattttcgtaaatatagattaccgtttatatcagtaatgactcatccaactacaggcggagtttcagccagtcttgcgactttaggcgatatcaatattgctgaacctaatgctctgataggttttgctggtcctagagttatagaacaaaccgttagagaaaaattaccagaaggttttcaaagaagtgaatttttattagaacacggcgatatagatatgattatcgataggagagaattacgcaccaagattgctgaaataatttctgtgctaacacatcaacaaacttcagtgtaa

SEQ ID NO: 319661 - DNA, 913 bp, Unknown
  Bacterial polypeptide expressing nucleotide sequence isolated from the Sargasso Sea
atgtattttttagattttgaaaaaccgattgccgaactcgaagcaaaaattgatgaattacgaagtgttgagagcgagcaagatgtgaatgtcagcaatgagatagcagcgttaaaaaaacgcagcgatgatctgacccaatctattttttcaactttgacttcatggcaaatatctcagatatcaaggcatccaaaacggccttacaccagagattatattgatcgaatttttatagattttgaagaattgcatggggaaagatgttttggtgatgatccagcaataataaccggtattgggcgtcttggtaaacaatctgtagtaatcataggacatcagaaaggaagagatactaaggaaagaataaagcgtaactatggaatgccaaaaccagagggatatcgtaaagctttacgtgtaatgcagctagccgaaagatttaatatgcctattttgacatttatagatacacctggcgcataccctgggatagaagcagaggagcgaggacaaagcgaagcaattgctaaaaatttgttagtaatgtcagaacttcaaactccaataattgcaactgtgataggtgaaggtggttcgggcggtgcattggcaataggagttgctgatcatttattaatgcttgaatatagtacatattctgttatttcacctgaaggatgtgcttcaattttatggaaaagtgcggacaaagcaaaagaagctgctcaatcaatgggcatagatgcaaaaaaattaaaggaacttggacttatcgatcgaattattgatgagcctttaggcggggcacatcgtgacttcgatgaaactgcaagaagaatcaagcaaacaataattgaagagcttgagcagctatgtgttcggcctgtatcacaagttgtcaatcaaagac

SEQ ID NO: 319662 - DNA, 457 bp, Unknown
  Bacterial polypeptide expressing nucleotide sequence isolated from the Sargasso Sea
atttcttggcggatcaatgggaagtgttgtaggtgaaaaatttgttcaaggcatcaataaagccattaagtacaaaactccatttatatgttttgcaactagcggaggtgcaagaatgcaggaatctatgatttctctaatgcaaatggcaaagacatcagctgcaatacaaaaattaaaaaaagaaaagctgccatatatttctgtattagttgatccaatatatggaggtgtgtctgcaagtattgcaatgcttggtgatattaatatcgcagaacctaatgctttgagtggatttactggaagaagagttatagaacaaactgtaagaattgaattgcctgataattttcaaaaatcagagtatcttttgagcaatggtgcaattgatatgatagttcatagaaataacttacgatcaaagatatcaggcctgttaaaaaaaatacataaataa

SEQ ID NO: 319663 - DNA, 556 bp, Unknown
  Bacterial polypeptide expressing nucleotide sequence isolated from the Sargasso Sea
atgagtatacagtttttggactttgaacagcccatagccgaactagaagcaaaaattgaagagcttaggttggtgaatcaaggtggcgagtttgacgttggcattgaagaagaaatcaataagcttcgcggtaaaagcgcagagctgactaagaagatcttttctgatcttggcgcatggcaagtttctcaacttgctcgtcacccaatgcgtccatacacgttagattacattcctcgtatttttacagaattcgacgagcttgctggtgaccgcgcgtttgctgacgataaagcgattgttggtggcccagcaatgctagatgatcagcctgtgatggttattggtcatcagaaagggcgtgataccaatgaaaagattaagcgtaacttcggtatgcctaaaccagaaggttatcgtaaagccctgcgtcttatgaagatggccgagcgctttaacatgcctatcatcacttttatcgatacgccgggagcgtatccaggtgttggtgctgaagagcgcggccaaagcgaagcaatcgcgaaaaatttatcga

SEQ ID NO: 319664 - DNA, 418 bp, Unknown
  Bacterial polypeptide expressing nucleotide sequence isolated from the Sargasso Sea
atgagtatacagtttttggactttgaacagccaatagccgaactagaagcaaaaattgaagagcttaggttggtgaatcaaggtggcgagtttgacgttggtattgaagaagaaatcaataagcttcgcggtaaaagcgcagagctgactaaaaagatcttttctgatcttggcgcatggcaagtttctcaacttgcacgtcacccaatgcgtccatacacgttagattacattcctcgtatttttacagaattcgacgagcttgcaggcgaccgcgcgtttgctgacgataaagcgattgttggtggcccagcaatgctagatgaccagccggtgatgattattggtcatcagaaagggcgtgacaccaacgaaaaaattaagcgtaacttcggtatgcctaaaccagaaagctacc

SEQ ID NO: 319665 - DNA, 712 bp, Unknown
  Bacterial polypeptide expressing nucleotide sequence isolated from the Sargasso Sea
tatgccaagacgttatcttcttgattttgaaaaacctcttgtagagcttgaaaagcaaatagagcaaataagagaattagcaagagattcagaagtagatgttagtcaacaattactacaactagaaacacttgccacaagaagaagagaggaaatttttagatccctaacacctgctcagaaaatacaagtagctagacatccacaaagaccaagtactttggattttattcaaatgttttgtgatgattggattgagttacatggagacagaaatggtggagatgatatggctttaattggaggtttaggttcggtaaataatcaacctgttcttttattaggtcatcagaaaggaagagatactaaggaaaatgtagttagaaactttggaatggcaaaacctggaggttatagaaaagctttaaggttaatgcagcatgccgacagattttcattgcctattcttacttttattgatactcctggggcatatgctggtctctctgcagaagagcaaggtcaaggagaagctatagctagaaacctaagagaaatgtttggttttaaagtcccaataattgctactattatcggcgaaggagggtctggtggagctctcggaattggtgtagctgataggctattgatgtttgaacatagtgtttatactgttgctagtccagaagcatgtgcctcaattcttggagag

SEQ ID NO: 319666 - DNA, 726 bp, Unknown
  Bacterial polypeptide expressing nucleotide sequence isolated from the Sargasso Sea
tttggactttgttcaaatgttttgtgatgactggatcgaattacatggagatagaaatggtggtgatgatatggcactaattggggggataggttcgataaataatagaccagtgttgatgttagggcatcagaaaggaagggacacaaaagaaaatgtagtaagaaactttgggatggcaaaaccaggaggttacagaaaagctctaagattaatgcagcatgcaaataggttctctttgccaatccttacatttattgatactcctggagcttatgctggtttaaaagctgaagaacaaggtcaaggtgaagcgattgcaagaaaccttcgagagatgtttggattgaaagttccaattgtggctactgtcattggagaaggaggctcaggaggcgcacttggaataggtgttgccgataggatactaatgtttgaacacagtgtttatacagttgctagtccggaagcatgtgcatcaattttgtggagagatgctgcaaaggcatcagaagctgcatcagcacttaaaattaccggtaaagatttacttaaattagggataatagatgaggtattacctgaaccttctggtgggaataattgggctcctttagatgctggtaacacactaaaagaggctatagtgaaacaccttaatgctttactgcaaatgcctgaagacgaattaattgaggaaagatacaaaaaattcagggttttagg

SEQ ID NO: 319667 - DNA, 643 bp, Unknown
  Bacterial polypeptide expressing nucleotide sequence isolated from the Sargasso Sea
gattcagaagtggatgttagtcaacagcttctgcagcttgaaaccttagctgccaggagaagagaagaaatatttaaatcactcacgccggcacaaaagattcaggtagctagacatcctcaaagacctagtaccctagactttgttcaaatgttttgcgatgaatggatcgaattacatggagacagaaatggaggcgatgatatggcactaattggagggataggtttgataaataatcgaccagtcttgattttagggcatcagaaaggaagagatacaaaagaaaatgtagtaagaaactttggaatggctaagccaggaggttacagaaaagctcttagattaatgcagcatgctgatagattttccttgcctatccttacatttattgatactcctggagcctatgcaggattaaccgctgaagaacaggggcaaggagaagcgatagcaagaaacttaagggagatgtttggcttgaaagttcctatagtagctactgtcatcggtgaaggtggttctggaggcgcacttggcataggtgtcgctgatagattactaatgtttgaacacagtgtttatacagttgctagtccagaagcatgtgcatcaattttaggagagatgctgcaaaggcgcc

SEQ ID NO: 319668 - DNA, 674 bp, Unknown
  Bacterial polypeptide expressing nucleotide sequence isolated from the Sargasso Sea
catgagcctcaattatcttgattttgagcttccgattgcagaattagaagcaaaaattgaagaattacaaagcataagccgcgctggcgaattagaccttgagctagaagaggaagtcagcaaattaaaagaaaaaagtgctaagcaaaaagaggaaatattctcaaatttaggcgcttggcaagtatcgcagttagcgcgtcatccgttgcgtccttatactcgagattatatcgagcgcattttcacggagtttgacgagtttgcaggcgatcgtacttttgctaacgacccggctattttaggcggtgttgcccgtttagatggcgaacccgttatggttattggccaacaaaaaggccgcgatacagctgaaaaaattaaacgcaactttggtatgccaaaaccagaaggctaccgtaaagcacttcgtttaatggaaatggctgagcgttttaaaatgccaataatgacctttatcgacacgccaggtgcataccctggtgttggcgctgaagagcgtggtcagtctgaagcaattgcacgtaaccttaaagtaatggcggcgcttaaagtgccaactatttgtacggttattggtgagggcggctcaggtggtgcattagcgattggtgttggtgacagagttaatatgttgcaatacagcacgtact

SEQ ID NO: 319669 - DNA, 448 bp, Unknown
  Bacterial polypeptide expressing nucleotide sequence isolated from the Sargasso Sea
aatgagtatacagtttttggactttgaacagccgatagccgaactagaagcaaaaattgaagagcttaggttggtgaatcaaggtggcgagtttgacgttggtattgaagaagaaattaataagcttcgcggtaaaagtgcagagctaaccaaaaaaatcttctcggaccttggcgcgtggcaagtttctcaattagcacgtcacccaatgcgtccatacacgctagattacattccgcgtatttttactgaattcgacgagcttgctggcgaccgcgcgtttgcagacgataaggcaattgttggcggcccagcaatgctagatgaccagcctgtgatgattataggtcatcagaaaggtcgtgatactaacgaaaagattaagcgtaactttggtatgcctaaaccagaaggctatcgcaaagcgctacgccttatgaagatggct

SEQ ID NO: 319670 - DNA, 701 bp, Unknown
  Bacterial polypeptide expressing nucleotide sequence isolated from the Sargasso Sea
gctgctaggagaagagaagaaatatttaaatcccttacccctgctcaaaagattcaggtagctagacatcctcaaagaccaagtactttggattttgttcaaatgttttgtgatgactggatcgaattacatggagacagaaatggtggcgatgatatggcactaattggggggataggcgcgataaataatagaccagtgttgatgttagggcatcagaaaggaagagacacaaaagaaaatgtagtaagaaactttgggatggcaaaaccaggaggttacagaaaagctctaagattaatgcaacatgcaaatagattctctttgccaattctcacatttattgatactcctggagcctatgctggtttaaaagctgaagaacaaggtcaaggggaagcgattgcaagaaaccttcgagagatgtttggattgaaagtcccaattgtggctactgtcattggagaaggaggttcaggaggtgcacttggaataggtgttgccgataggctactcatgtttgaacacagtgtttacacagttgctagtccggaagcatgtgcatcaattttgtggagagacgctgcgaaggccccagaagctgcatcagcacttaaaattacaggtaaagatttacttaaattagggataatagatgaggtattacctgaaccttctggtgggaataattgggctccttt

SEQ ID NO: 319671 - DNA, 476 bp, Unknown
  Bacterial polypeptide expressing nucleotide sequence isolated from the Sargasso Sea
gggaggatccatgggttcagtagttggtgaaaaaattacaaggataattgagagagcaactttggaaaattttccaattcttattgtttgcgcatcaggaggagccaggatgcaagaaggtatgttaagtcttatgcaaatggcaaaaatatctggagcacttaaaaaacataaagagaaaaatctcctatatatgcccttgttaactcatccaactactggaggggtaacagccagctttgcgatgttaggtgatttgattttggcggaacctaaagcgcttattggatttgctggaagaagggttatagaacaaacattaagagaaaaattacccgataattttcaaacagctgaatatctgcttgagcatggttttgttgatgtaatagtgaaaaggaaagatctcaaggatactctgactaaaattttaaaaattcatggtgtaaaagaacttgcagaagccaatatataaa

SEQ ID NO: 319672 - DNA, 744 bp, Unknown
  Bacterial polypeptide expressing nucleotide sequence isolated from the Sargasso Sea
tagtcaacagcttctgcagcttgaaaccttagctgctaggagaagagaagaaatatttaaatctcttacccctgctcaaaagattcaggtagctagacatcctcaaagacctagtactttggattttgtacaaatgttctgtgatgactggatcgaattacatggagacagaaatggtggcgatgatatggcactaattggggggataggttcgataaataatagaccagtgttgatgttagggcatcagaaaggaagggacacaaaagaaaatgtagttagaaactttgggatggcaaaaccaggaggttacagaaaagctcttagattaatgcagcatgcaaatagattctctttgccaattcttacatttattgatactcctggagcttatgctggtttaaaagctgaagaacaaggtcaaggtgaagcgattgcaagaaaccttcgagagatgtttggtttgaaagttccaattgtggctactgtcattggagaaggaggttcaggaggcgctcttggaataggtgttgccgataggttactaatgtttgaacacagtgtttacacagttgccagtccggaagcatgtgcatcaattttgtggagagatgctgcgaaggcaccggaagctgcatcagcacttaaaattacaggtaaagatttacttaaattaggtataatagatgaggtattaccagaaccttctggtgggaataattgggctcctttagatgctggcaa

SEQ ID NO: 319673 - DNA, 697 bp, Unknown
  Bacterial polypeptide expressing nucleotide sequence isolated from the Sargasso Sea
atggctaaacgttacctccttgattttgaaaagcctcttgttgaacttgagaagcagatagagcaaattaaagaattagctcgagattcagaggtagatgttagtcaacagcttctacagcttgaaaccttagctgcaaggagaagagaagaaatatttaaatctctcacccctgctcaaaagattcaggtagctagacatccccaaagaccaagtactttggactttgttcaaatgttttgtgatgactggatcgaattacatggagatagaaatggtggcgatgatatggcactaattgggggaataggttcgataaataataggccagtgttgatgttaggccatcagaaaggaagggatacaaaagaaaatgtagtaagaaactttgggatggcaaaaccaggagggtacagaaaagctcttagattaatgcagcatgcaaatagattctctttgccaattcttacatttattgatactccaggagcttatgctggtttaaaagctgaagaacaaggtcaaggggaagcgattgcaagaaaccttagagaaatgtttggattgaaagttccaattgtggctactgtcattggagaaggaggttcaggaggtgcacttggaataggtgttgccgataggttactaatgtttgaacatagtgtttacacagttgctagtcctgaagcatgtgcat

SEQ ID NO: 319674 - DNA, 565 bp, Unknown
  Bacterial polypeptide expressing nucleotide sequence isolated from the Sargasso Sea
ggccaccggtcttcgggatggtgtcgtgacaggtctctgtcgtgtggatggtctggccatggccctggcggtgatggacttccgcttcatgggcggatcaatgggatccgttgtgggggagaagatcacccgtctggtggaggaagccaccgcccgtcggctgccgctgttgatcgtgtgtgcatcaggcggtgcccgcatgcaggagggaatgctcagcctcatgcagatggccaagatctccggtgctctggagcgccaccgcgaagcggagctgctctacatgccgctgctcacgcaccccaccacaggtggcgtcaccgccagttttgccatgctcggagacctgatcctggcggaaccaaaggccctgatcggtttcgctggacggcgggtgatcgagcagacgctgcgcgagaagctgcctgacaatttccagaccgcggagtatctgcaggaccacggcttcgtggacacgatcgttcctcggacccagttgcgcagcagccttgccagcctgctccggttgcatggctgcaggcccatggagatcaccagcgcatga

SEQ ID NO: 319675 - DNA, 425 bp, Unknown
  Bacterial polypeptide expressing nucleotide sequence isolated from the Sargasso Sea
acaggccaccgagcgaggtctcccccttctgattgtttgtgcctctggaggtgcccgcatgcaggagggcatgctcagcttgatgcagatggccaagatttcaggagcccttgagcgtcatcgggaagcggagcttctctacctgcctttgctgacccatcccacgacaggtggcgtgacggccagtttcgccatgcttggagacctcattttggcggaaccgaaggctttgattgggtttgctgggcgtcgtgtgatcgaacagaccctgcgcgagaaacttcctgacaatttccaaacggcggaatatctccaggaccatggttttgtggatgccatcgttccgcgggttcagctgcgcagcaccctggctcgcttgttgcgtcttcatggttgtcgagctctggagctgaccagcgcatgac

SEQ ID NO: 319676 - DNA, 799 bp, Unknown
  Bacterial polypeptide expressing nucleotide sequence isolated from the Sargasso Sea
atgagtctttttctggattttgaacagccgatcgccgagttgcaggcgcagattgacgaactccgtcatgtgagtgaaggcaatcacgccgtggatcttaaagaagagatccgtcggctggagaagaaaaacgaagagctgaccaagaagatcttcggcgatctgggggcctggcaggtatcccagatggcgcgtcatccccagcgcccctataccctcgactacatcgagcacatcttcaccgacttcgacgagctggccggcgatcgcgcctatgccgatgacaaggccatcgtcggcggcagcgcccgtctcgacggcgagccggtgatggttatcggccaccagaaggggcgcgagaccaaggagaagatcaagcgcaacttcggcatgccgcgcccggaagggtatcgcaaggccctgcgcctgatggagatggccgagcgcttcaagatgccgatcatcaccttcatcgacaccccgggtgcttaccctggcgtcggtgccgaagagcgcggccagtccgaggcgattgcccgcaacctgaaagtgatggccggtctgaccgtgccggtagtctgcaccgtgatcggtgaaggcggctccggcggcgccctggccatcggtgtcggcgatcgcgtcaacatgctgcagtattccacctactcggtcatctcgccggaagggtgcgcctccatcctgtggaagagcgccgacaaggcgccggtcgcggccgatgccatgggcatcaccgcccagcgcctgaaggagctgaaactcatcgacaacatcgtcgagg

SEQ ID NO: 319677 - DNA, 423 bp, Unknown
  Bacterial polypeptide expressing nucleotide sequence isolated from the Sargasso Sea
gagcaactttggaaaattttccaattcttattgtttgcgcatcaggcggagcaaggatgcaagaaggtatgttaagtctcatgcaaatggcaaaaatatctggagcactaaaaaaacataaagagaaaaatctcctatatatgcccttattaactcatccaactactggaggggtaacagccagctttgcgatgttaggtgatttaattttggcggaacctaaagcacttattggatttgctggaagaagggttatagagcaaacattaagagaaaaattacccgataattttcaaacagctgaatatctgcttgagcatggttttgttgatgtaattgtgaaacgaaaagatctcaaggatactctgactaaaattttaaaaattcatggtgtaaaagaacttgcagaagcaaatatataaa

SEQ ID NO: 319678 - DNA, 694 bp, Unknown
  Bacterial polypeptide expressing nucleotide sequence isolated from the Sargasso Sea
tatgcctaaacgttacctccttgattttgaaaagcctcttgttgaacttgagaagcagatagagcaaattaaagaattagctcgagattcagaggtggatgttagtcaacagcttctacagcttgaaaccctagctgctaggagaagagaagaaatttttaaatctctaactcctgctcagaagattcaggtagctagacatcctcaaagaccaagtactttggactttgttcaaatgttttgtgatgactggatcgaattacatggagacagaaatggtggcgatgatatggcactaattggagggataggttcgataaataacagaccagtgttgatgttagggcatcagaaaggaagggacacaaaagaaaatgtagtaagaaactttgggatggcaaaaccaggaggttacagaaaagctcttagattaatgaagcatgcaaatagattctctttgccaattcttacatttattgatactcctggagcttatgctggtttaaaagctgaagaacaaggtcaaggggaagcgattgcgagaaaccttcgagagatgtttggattgaaagtcccaattgtggctactgtcattggagaaggaggttcaggaggcgcacttgggataggtgttgcagataggttactgatgttcgaacacagtgtttacacagtggctagtccggaagcatgt

SEQ ID NO: 319679 - DNA, 871 bp, Unknown
  Bacterial polypeptide expressing nucleotide sequence isolated from the Sargasso Sea
ctgctcgactggtttgctgatcgccgcaagacggctcccgcgttgcgaccaacgccagagcctgatgagggtgatggcctgtggagcaaatgccctgaatgtggcgaggtggtctaccgcaaggacctcgtggccaatgccagtgtctgcgcctcctgcggttaccaccacaggattcacagcgaagaacgcttgcgaatcttgctggatccaggcagcttcattcccatcgatggtgagctgagccccaccgatccactggctttcaaagatcgccgcgcctacgccgatcggatccgcgacagccagcagcaaaccggattgcgcgatgccgtggtctgcggcacaggaaccattgaggggcaggggatcgccttggccgtgatggatttccgcttcatgggcggaagcatgggctcagtagtgggcgagaaaatcacgcgcctaatcgaaaccgcaactgagcggaaactgccggtattggtggtctgcgccagcggtggagcacgcatgcaggaaggcatgctcagcctgatgcagatggccaagatctctggtgcactggagcgccaccgggccaaaaagctgctttatatccccctactgacccaccccacgaccgggggcgtcacagccagcttcgcgatgctgggcgatctaattttggctgagcccaaagcgctgattggctttgcgggccgtcgggtgattgagcaaaccctgcgagagaagcttcccgacaacttccaaacagccgagtatctccaggaccacgggtttgttgacgcgatcattcctcgcacgcagatgcggagccgacttgccagcttgctggtgatgcaccagcagaccgcaaagattccggcatgag

SEQ ID NO: 319680 - DNA, 1009 bp, Unknown
  Bacterial polypeptide expressing nucleotide sequence isolated from the Sargasso Sea
tatggctaaacgttacctactggattttgaaaagcctctcgttgaacttgaaaagcagatagagcaaattaaagaattagctcgagattcagaagtagatgtcagtcaacagcttctacagcttgaaaccttagctgcaagaagaagagaagaaatttttaaatccctgacccctgctcaaaagattcaggtagccagacatcctcaaagacctagtactttggactttgttcaaatgttttgtgatgactggattgaattacatggagacagaaatggtggcgatgatatggcactaattggggggataggttcgataaataatagaccagttttgatgttagggcatcaaaaaggaagggatacgaaagaaaatgtagtaagaaactttgggatggcaaaaccaggaggttacagaaaagctcttagattaatgcagcatgcgaatagattctctttgccaattcttacatttattgatactccaggagcttatgctggtttaaaagctgaagaacaggggcaaggggaagcgattgcaagaaaccttagagagatgtttggattaaaagtcccaattgttgctactgtcattggagaaggaggttctggaggtgcacttggaattggtgttgccgataggttactaatgtttgaacacagtgtttacacagttgctagtccggaagcatgtgcatcaattttgtggagggatgctgcgaaggcaccagaagctgcatcagcacttaaaattacaggtaaagatttacttaaattaggtataatagatgaggtattatcggaaccctctggtgggaataattgggctcctctagatgctggtaacacactcaaagaggctattgagaaacatcttaatgctttactgcaaatgtctgaagacgaattaattgacgaaagatacaaaaagtttagggttttaggtaaatttatcgaagcaaataatattgaagagatttatagtgaaatccctcaaaaaactgaataa

SEQ ID NO: 319681 - DNA, 1009 bp, Unknown
  Bacterial polypeptide expressing nucleotide sequence isolated from the Sargasso Sea
atggctaaacgttacctccttgattttgaaaagcctcttgttgaacttgagaagcagatagagcaaattaaagaattagctcgagattcagaggtagatgtaagtcaacagcttctacagcttgaaaccttagctgccaggagaagagaagaaatatttaaatctctcacccctgcacaaaagattcaggtagcaagacatcctcaaagaccaagtactttagactttgttcaaatgttttgtgatgactggatcgaattacatggagacagaaatggtggcgatgatatggcactaattgggggtataggttcgataaataatagacctgtgatgatgttagggcatcagaaaggaagggacacaaaagaaaatgtagtaagaaactttgggatggcaaaaccaggaggttacagaaaagctcttagattaatgcagcatgcaaatagattttctttgccaattcttacatttattgataccccaggagcttatgctggtttaaaagctgaagaacagggtcaaggggaagcgattgcaagaaacttacgagagatgtttggattcaaagtcccaattgtggctactgtcattggagaaggaggttcgggaggtgcacttggaataggcgtcgccgacaggttactaatgtttgaacacagtgtttatacagttgccagtccagaagcatgtgcatcaattttgtggagagatgctgcgaaggcacctgaggctgcatcagcactaaaaattacaggtaaagatttacttaaattggggataatagatgaggtattaccagaaccttctggtgggaacaattgggctcctttagatgcgggcaatacactaaaagagtctattgagaagcaccttaatgctttactgcaaatgtctgaagatgaattaattgaggaaagatacaaaaagtttagggttttaggtaaatttatagaagccaataatattgaagagatttacagtgaaattccccaaaaaactgaataaa

SEQ ID NO: 319682 - DNA, 457 bp, Unknown
  Bacterial polypeptide expressing nucleotide sequence isolated from the Sargasso Sea
atgctgaattatttagagtttgagcaaccgattgcggaacttgaagccaaaatagaagaacttcgcaaagtaagccgcaatggcgagtttgatctcggccttgaagaagaagtaaacaagctgaaggaaaaaagcttaactctgacaaaaaagatctttgcagaattaggtgcctggcaggttgctcagttagcccgtcatccgttgcgtccttacacgctggattacatcaaacatattttcactgactttgacgagtttgctggtgatcgtacttttgccaacgatccggccattgtctgtggtacagcccgtttaggtgacaaaactgtgatggttattggtcatcaaaaaggccgtgacacctcagagaaaatcaaacgtaactttggtatgccaaaacctgaaggctaccgtaaagcattacgtatgatggaaatggctgaacgttttaatt

SEQ ID NO: 319683 - DNA, 874 bp, Unknown
  Bacterial polypeptide expressing nucleotide sequence isolated from the Sargasso Sea
atgagctggctcgacaaactgttgccgccgaagatcaagcagaccgacccgaaaagccgcaagggcattccggaaggcctgtgggtcaagtgcccgtcctgcgaggccgtgctgtaccgcaacgacgtggacgcgaacctgcacgtgtgcccgaagtgcgaccaccacatgcgcatcggtgcgcgcgagcgcctcgacgggctgctcgatccggaaggccgctacgagatcggccaggaaatcgtgccggtcgacacgctgaagttcaaggacagccgcaagtaccccgatcgtctgaaggaagcgatggacgatacgggcgaaaccgacgcgatggtcgtgatgggcggtgcgatccacacgctgccggtggtcgcagcctgcttcgagttctcgttcatgggcggctcgatgggctcggtggtgggcgagcgcttcgtccgcggcgcgcagaacgcgctggaacagcaggtgccgttcatctgctttaccgcttcgggcggtgcccggatgcaggaaagcctgctgtcgctgatgcagatggcgaaaaccaccgcgatgctgaccaagctggccgaagcgaagctgccgttcatctcggtgctgaccgacccgacgatgggtggcgtgtcggcgagcttcgccttcctcggtgacgtcgtgatcgccgaaccgaaggcgctgatcggcttcgccggcccgcgcgtgatcgagcagacggttcgcgagaagctgccggaaggcttccagcgcgccgaattcctgctgaagacgggtgcgatcgacatgatcgtcgaccgtcgcaagatgcgcgacgagatcgcgcagctactcgcgctgctgcagcggcaaccggccgacgcgctggcctgac

SEQ ID NO: 319684 - DNA, 877 bp, Unknown
  Bacterial polypeptide expressing nucleotide sequence isolated from the Sargasso Sea
tctgttcgactggttcgctgaccgccgcaagggtcagtccaccggaaagatcattcaggaacctgaggagggcgatggtctctggagcaagtgccccgagtgcagcctcgtcgtttacgtcaaggatctgaaggccaatgccagcgtctgcgcaggctgcgggcatcaccaccgcatcgatagcgaggaacgcatcgcgttgattgccgatccgggcagctttcacgctctgaatgaggcgttggaaccgaccgaccctctgaccttcaaggaccgtcgcgcctacgccgatcgccttcgggaaagtcaggcggccaccgggcttcgggacggggtcgtcacgggcctctgtcgcgttgaagggttggatctggcgctggcggtgatggacttccgcttcatgggtggatcgatgggatccgtggtgggggagaagatcacacgcctcgtggaggaggccacctcgcggcggctgccgttgttgatcgtgtgtgcttcgggtggtgcccgcatgcaggaggggatgctcagcctgatgcagatggcgaagatttccggcgccctcgagcgccaccgcgaagcggagttgctgtacctgcccctgctcacgcacccaacgacagggggcgtgacggccagttttgccatgcttggcgatctgatcctggcggagcccaaggcgttgatcggttttgccggaaggcgcgtgatcgagcagaccctgcgcgagaagcttccggataactttcagaccgctgaatatctgcaggaccacggttttgtggacaccatcgttccgcgcacccagttgcgcagcaccctcgccagcctgttgcggctgcatggttgcaagcccaaggagctcaccaccgcatga

SEQ ID NO: 319685 - DNA, 514 bp, Unknown
  Bacterial polypeptide expressing nucleotide sequence isolated from the Sargasso Sea
atgcctttagcattagctgttatggattttagatttatgggaggatccatgggttcagtagttggtgaaaaaattacaaggataattgagagagcaactttggaaaattttccaattcttattgtttgcgcatcaggcggagcaaggatgcaagaaggtatgttaagtctcatgcaaatggcaaaaatatctggagcactaaaaaaacataaagagaaaaatctcctatatatgcccttattaactcatccaactactggaggggtaacagccagctttgcgatgttaggtgatttaattttggcggaacctaaagcgcttattggatttgctggaagaagggttatagagcaaacattaagagaaaaattacccgataattttcaaacagctgaatatctgcttgagcatggttttgttgatgtaattgtgaaacgaaaagatctcaaggatactctgactaaaattttaaaaattcatggtgtaaaagaacttgcagaagcaaatatataaa

SEQ ID NO: 319686 - DNA, 1009 bp, Unknown
  Bacterial polypeptide expressing nucleotide sequence isolated from the Sargasso Sea
catggctaaacgttaccttcttgattttgaaaagcctcttgttgaacttgagaagcagatagagcaaattaaagaattagctcgagattcagaggtagatgttagtcaacagcttctacagcttgaaaccttagctgctagaagaagagaagaaatatttaaatctctcacccctgctcaaaagattcaggtagctagacatcctcaaagaccaagtactttggactttgttcaaatgttttgtgatgactggatcgaattacatggagacagaaatggtggcgatgatatggcattaattggggggataggttcgataaataatagaccagtgttgatgttagggcatcaaaaaggaagggatacaaaagaaaatgtagtaagaaactttgggatggcaaaaccaggaggttacagaaaagctcttagattaatgcagcatgcaaatagattcgctttgccaattcttacgtttattgatactcctggagcttatgctggtttaaaagctgaagaacaaggtcaaggagaagcaattgcaagaaaccttcgagagatgtttggattgaaagttccaattgttgctactgttattggagaaggaggttcaggaggcgcacttggaataggtgtcgccgataggttactaatgtttgaacacagtgtttacacggttgctagtccagaagcatgtgcatcaattttgtggagagatgctgctaaggcaccagaagcggcatcagcacttaaaattacaggcaaagatttactgaaattaggtattatagatgaggttttaccagaaccttctggtgggaataattgggctcctttagatgctggtaacacactaaaagaggctattgagaaacaccttaatgctctactgcaaatgcctgaaggccaattaattgaggaaagatacaaaaagttcagggttttaggtaaatttatcgaagcaaataatattgaagaaatttatagtgaaatccctcaaaaaactgaataa

SEQ ID NO: 319687 - DNA, 1009 bp, Unknown
  Bacterial polypeptide expressing nucleotide sequence isolated from the Sargasso Sea
tatggctaaacgttacctccttgattttgaaaagcctcttgttgaacttgagaagcagatagagcaaattaaagaattagctcgagattcagaagtagatgttagtcaacagcttctgcagcttgaaaccttagctgctaggagaagagaagaaatatttaaatctctcacccctgctcaaaagattcaggtagctagacatcctcaaagaccaagtacgttggattttgttcaaatgttttgtgatgactggatcgaattacatggagatagaaatggtggcgatgacatggcattaattggggggatcggttcgataaataatagaccagtgttgatgttagggcatcagaaaggaagggacacaaaagaaaatgtagtaagaaactttgggatggcaaaaccaggaggttacagaaaagctcttagattaatgcagcatgcaaatagattttctttgccaattcttacatttattgatactcctggagcttatgctggtttaaaagctgaagaacaaggtcaaggtgaagcgattgcaagaaaccttcgagagatgtttggattgaaagttccaattgtggctactgtcattggcgagggaggttctggaggagcacttggaataggtgttgccgataggttactaatgtttgaacacagtgtttacacagttgctagtccggaagcatgtgcatcaattttgtggagagatgctgcgaaggcaccagaagctgcatcagctcttaaaatcacaggtaaagatttacttaaattaggaataattgatgaggtattaccagaaccttctggtgggaataattgggctcctttagatgctggtaacacactaaaagaggctattgagaaacaccttaatgctttactgcaaatgcctgaagacgaattaattgaggaaagatacaaaaagtttagggttttaggtaaatttatcgaagcaaataatattgaagaaatttatagtgaaatcccccaaaaaactgaataa

SEQ ID NO: 319688 - DNA, 1121 bp, Unknown
  Bacterial polypeptide expressing nucleotide sequence isolated from the Sargasso Sea
gtgtggtcacttcggatacgggaagatcaatggcaagctggtttatgttttcagccaagattttactgtatttggtggatcactctcagaaacacatgctgagaaaatctgcaaagtcatggatcatgcggtgagaaacggagcacctctcattggtttgaatgactcaggaggcgccagaattcaagaaggcgtggtttcactcggtggttatgcagaagtcttcaaaaggaatgtgcttgcatctggtgttgttccacaaatatcgctcgttatggggccatgtgctggtggagcagtatattcccctgcaatgactgactttatttttatggttgaggatagttcatatatgttcgtaacaggtcctgatgtagtcaaaacagttacacatgaagaggttacggcagaagaactgggtggagcatccacgcatagtcaaaaatctggtgtagctgatctaacatttgaaaatgatactgatgccctattgatgacaagagagttcatgagttatctcccacagagcaatcaagagcatcctgagactattgagtgcaaagactcaactgaacgagaggagcctgcacttgatactttggtcccacaagatccttcaaaaccttatgatataaaagaagtcattcataaggttgctgacgaaggtgaattcttcgaacttcaaccaaaatatgcacaaaatatcgtgacaggatttattcggcttaatggatcaagcattggtgtggttgccaatcagccaatggtactggctggctgtcttgatattaactcctcaatcaaggccgctcgttttgttagattctgtgatgcattcaatgtccccatcttaacccttgttgatgttccaggtttcatgccaggcacttctcaagagtatggtggaatcatcaagcacggcgcgaagcttctgtttgcctatgccgaagcaactgttccaaaagtcactatgattacgagaaaagcttatggtggagcttatgatgtgatgagttcgaaacacatcaggggtgatataaattttgcttggccatctgcagaaatagctgtcatgggacccaaaggtgctgttgagattatcttcagacaagatattgggg

SEQ ID NO: 319689 - DNA, 580 bp, Unknown
  Bacterial polypeptide expressing nucleotide sequence isolated from the Sargasso Sea
gtaggtgtagtcgctacccagccattagttttagcaggttgtttggatattgattcatcaaaaaaagcagctagatttgttcgtttctgtgattgttttaacatacctataataacttttgtggatgtaccaggttttttacctgggactgcacaagaatatgggggcatcattaaacatggtgcaaaactattatttgcttatgctgaggcaaccgtaccaaaaataacggttataacccgaaaagcatatggtggggcctatgatgttatgtcatctaaacatattcgtggagatttaaactatgcttggcccactgctgagatagcagttatggggcctaagggtgcagtagaaatcatttaccgggaagatagagatgaccctgcaaaaatagaatcaagaactgaagaatatcgggataagtttgctaatccttttgtggcagcccagaaagggtttattgatgatgttatattccctcgaaatacgcgtagaaggctttgtcgatcacttcgtctacttaagaataaaaagctagaaaacccatggaagaagcatgacaatattcctctgtagg

SEQ ID NO: 319690 - DNA, 454 bp, Unknown
  Bacterial polypeptide expressing nucleotide sequence isolated from the Sargasso Sea
aatgagcgatattttaaccgaactcgaaaatcgaagagctgaagcccgtttaggtggtggcaagcaacgtattaatgcgcaacacgcaaaaggtaaattgacagcaagggaacgtattgaaattttgttggatgaggggtcctttgaagagtttgatatgttcgtggtgcaccgttgtgaagactttggaatggctgaccaaagaccggctggtgatggagttgtcaccggttggggaacaatcaatggccgcatgatatatgtattttcgcaggactttacggtctttggtggatcgttatctgaaacacatgctcggaaaatatgcaaaattatggacatggccatgcaaaacggggcacctgtaatcggtattaatgactctggaggagcccgtattcaagaaggtgtggcctctcttgcaggttatgctgaagtttttcagcgtaacgta

SEQ ID NO: 319691 - DNA, 795 bp, Unknown
  Bacterial polypeptide expressing nucleotide sequence isolated from the Sargasso Sea
taagtaatagagaacggtccccggaaatagcgaatgaagataatgttaaaagaatggagccatctcttgatactcttattccagaaaatccaaatacaccatatgatatgaaagagttaatattgaaaatttgtgactgcgcagatttttttgaaactcaagaacagtttgcaaagaatattatcaccggattttgtcgttttaatggtcaaactgttggcgtagtggcaaatcaaccgttggttctagcgggttgtctagacatagatagttcgaaaaaggctgctcggtttgttaggttttgtgacgcttttgagatacctcttcttactttagtagatgtgcctgggtttttacctggcactgcgcaagaatatggaggtgtaattaaacatggtgcaaaattattgtttgcctatggggaagctactgttccaaaagttacggttataactcgaaaagcttatggaggggcatatgatgtaatgtcctcaaaacatcttcggggcgattttaattatgcctggccaactgctgaaatagcagttatgggagccaaaggtgccgtggaaatactatatagatctgaacttcaggatacgaaaaaaattactaagagaactagtgaatatgaagatagatttgccaatccatttgtagctgcgcaaaaaggatttattgatgaagtgatcatgcctcataatactagaaaaagggttgtaggtgctttttcaacattaaaaaataagaaactttcaaacccacaaaaaaagcatgataatattccattgtaat

SEQ ID NO: 319692 - DNA, 806 bp, Unknown
  Bacterial polypeptide expressing nucleotide sequence isolated from the Sargasso Sea
gacagattttatttttatggtaaaagatagttcttatatgtttgtaacaggtccagacgttgtcaaaacagtgacaaatgaagtggtcactgccgaagaactgggtggagcgtccacgcacacaaaaaaatcgtcagttgcagatggtgccttcgaaaacgatgttgaggcgcttgccgaaattcggcggttgatggattttttgccactaaataatcgtgaaaaagctcctgtacgtccattttttgatgatcccgataggattgaattatcacttgatacattaattcccgaaaacccaaatactccatacgatatgaaggaactaattgtgaaagttgcggatgaaagtaatttttttgaaatacaggaggattttgcaaaaaatataataattggttttattcgcctggaaggtcagacaattggtgttgttgcaaaccaacctattgtactggctggttgtttagatatagatagctcaagaaaagcagcccgatttgttaggttctgtgatgcttttgaaatccctattttgacattagttgatgttcctggtttcttacctggaacatcccaagaatatggtggcgttattaagcatggcgctaaacttttatttgcttacggtgaggcaacagtacctaaagttacagtaataactaggaaagcgtatggtggtgcttacgatgtgatgtcttccaagcatttaagaggagatttcaactatgcatggcctactgctgaaattgcggttatgggagcaaaaggggccacggaaataatacatagaaacgatcttggga

SEQ ID NO: 319693 - DNA, 433 bp, Unknown
  Bacterial polypeptide expressing nucleotide sequence isolated from the Sargasso Sea
aatgaaggaaattgcaaaagaactagcgaggaggaggcgctcggccgaggaaggtggaggtccagcgcgagtgaaggcccaacacggaaaggggaagcttaccgcccgcgaaagattagagattctgctggatccaggttcttttgaggaatatgacgcctttgttgagcatagatctacggaattcgggatggggtctagcaagatccctggcgatggtgttgttacgggacacgggacaatcaatggtagggcactgtttgtatttagccaagattttactgtatttggtggtagcctcagtgaggctcatgctgagaaaatttgcaaggttatggatcaagcaatgaaagttggcgtgcctgtgataggcattaatgattcaggtggtgcgcggatccaagaaggagtggcgtctctgggaggttatgct

SEQ ID NO: 319694 - DNA, 832 bp, Unknown
  Bacterial polypeptide expressing nucleotide sequence isolated from the Sargasso Sea
aaaacaggatgtcctgttataggtctcaatgattcagggggtgcaagaatccaagaaggtgttgtaagcttgggaggttatgctgagatattctatagaaacgttcaatcttccggagttattcctcaattttctttaatcttagggccctgtgctggaggggcagtctatagtcctgcaatgactgatttcacacttatggtcaaagattcaagtcatatgttcataactggaccagatgttatcaagactgtaactcatgaagaagtaactttcgaagaactgggtggtgctatgacacataattcaacctcaggagtagctcatctcgcttgtgaatctgaagaaagtatgtttgaatcattgagagaattactaagttttattcctcagaataatatggaaaatgtacctattatgccttacgaaaaaaaggaattggatagtattaatgagttagatgaaataattcctgataattcaaatgtaccctatgacatgactaaagtaataaatttaatttttgacgaccatttgtttgaagttcaacctcactgggctaagaatattattactggatttgctagactcagaggacatcctgtaggtattgtagccaatcaaccttcttttttagcaggttgtcttgatattgatgcatctaccaaagctgcacgttttgtccgattttgtgatgctttcaatattcctttagttactttcgtagacgtacctggttttctacctgggactgaacaagagcatggaggcataattcggcatggtgcaaaactgttgtacgcattttcagaagcgtcgttccaaaattaac

SEQ ID NO: 319695 - DNA, 883 bp, Unknown
  Bacterial polypeptide expressing nucleotide sequence isolated from the Sargasso Sea
ggtaaattaacagctagagaaagattggaattattagttgatgaaggtacatttcatgaaatcgattctttagtagaacatcgttgtagagatttcgatatggataaaaatgttatcccaggagatggagttgtaaccgggcacgggaaaataggaggaaaaccgatttactgttttgctcaagattttactgtatatggaggctctctaggtgaaatgcatggattaaaaatttgtaaagttctcgacatggctttgaaaactggagttccagtaattggattaaacgatagtggtggtgccagaatacaagaaggtgttgcaagccttggaagttatgcagaaatattttttagaaacgttagagcaagtggagtaataccacaaataagtttgataatgggtccttgtgcaggaggagcagtttattctcccgcaataactgattttgttgtaatggttgataaatcagcacatatgttcattactggtcctgaagtgataaaaacagtcactaatgaaattgttagtttcgaagatttaggaggagcagcaacacataatagtaaatcgggagtttcacatttcattgcagaaaatgatgaagatgcaatagaaatagcaagagaattaatttctattttacctgcaaataaccttcaaaaagcaccctcaaaaaatagtaatgataacccaaaccgactttgtgaagatttaattgatttagtcccagaagatcctagtcagccatatgatgtaaaaaaagtaatctcatccattgttgatgatggagcatttttagaagttcaagcggaatgggcaaaaaatattgttataggttattctcacttaaaatggaaatctaattggggttattgcaaat

SEQ ID NO: 319696 - DNA, 847 bp, Unknown
  Bacterial polypeptide expressing nucleotide sequence isolated from the Sargasso Sea
agtcacaggttatggaacaattaatggtagattaacttttgtgtttagccaagattttactgtttttggaggatcactatcagagtctcatgctgaaaaaatttgcaaaattatggacaaagcattacaagttggagctcctgtaataggtttaaatgattctggtggagcacgaattcaagaaggcgttgcctcgcttgctggttatgcagaggtttttcaaagaaatgtattatcttctggtgtaattccgcaaatttctgtaattatgggtccttgtgctggtggtgctgtgtatagccccgcaatgactgattttatttttatggttaaagatacttcatatatgtttgtgactggaccagatgttcttaaaacagttactcatgaagaggttagccacgaagaattaggtggagcttcaacacacactaaaaagtctggagttgcggatttagctttcgaaaatgatgttgaggcattatttcaacttagaagatttatgggttttttaccgtcctcaaataaagagcaacctcctactagaccatctgaggatccagccgatagattagaattttctcttgatactcttgttcctgataaccctaataaaccatacgatatgaaggaattaataacaaaagtagttgatgatagagatttttttgaaacccagtcagattatgcggctaatattataactggtttcgctcgaatgacagggtctccagtcggaattgttgctaatcaaccaatggtcttggctggatgccttgataataactctgctcgtaaagcagctagatttgttagattttgtgattgttttaatataccaattata

SEQ ID NO: 319697 - DNA, 661 bp, Unknown
  Bacterial polypeptide expressing nucleotide sequence isolated from the Sargasso Sea
gacatcctactagatgatggatcctttcaggagctcgatatgtttgtagaacacagagctgttgactttgatatggataaacaaaaaattcctggtgatggtgtggttacaggatacgggaagatcaatggaaagttggtttatgttttcagccaagattttactgtatttggtggatcactctcagaaacgcatgctgagaaaatctgcaaagtcatggatcatgcggtgagaaacggagcacctctgattggtttgaatgactcaggtggtgccagaattcaagaaggcgtggtttcactcggcggttatgcagaggtcttcaaaaggaatgtccttgcatctggtgttgttccacaaatatcactcgtcatggggccatgtgctggtggagcagtatattcccctgcaatgactgactttatttttatggttgaggatagttcatatatgttcgtaacaggtcctgatgtagtcaaaacagttacacatgaagaggttacggcagaagaactgggtggagcatccacgcatagtcaaaaatctggtgtagctgatctaacatttgaaaatgatactgatgccctattgatgacaagagagttcatgagttatcttccacagagcaatcaagagcatcctgagactattgagtgcgaag

SEQ ID NO: 319698 - DNA, 577 bp, Unknown
  Bacterial polypeptide expressing nucleotide sequence isolated from the Sargasso Sea
ggtgttgttgcaaaccaacccatggtcctggccggttgtttagatatagacagctcaagaaaagcagcccgatttgttaggttctgtgatgcttttgaaatccctattttgacattggttgatgtccctggttttttacctggaacatcccaagaatatggcggcgttattaagcatggcgcaaaactactatttgcctatggtgaagcaacggttcccaaagttacggtcataactaggaaagcgtatggtggcgcttacgatgtaatgtcctccaaacatttaagaggagatttcaactatgcatggcctacagctgaaattgcggttatgggagcaaaaggggcaactgaaataatacataggaacgatcttgggaatgaaaaaaagattgctaagcatactgctgactacgagcagcgtttcgctaacccatttgtagcagcagagcgcggatttatagatgaagttatacagccgcgtagtaccagaaaacgaatttcgagggcatttgcagctcttcgtggaaagcaactcaaaaatccatggaaaaaacatgataacatacctctataag

SEQ ID NO: 319699 - DNA, 710 bp, Unknown
  Bacterial polypeptide expressing nucleotide sequence isolated from the Sargasso Sea
agaatttgacatgtttgtagtgcatcgttgtgaagattttgggatggctgatcaaaggccagctggtgacggagtcgtaaccggttggggtacgataaatggtcgaatggtttatgtattttctcaagatttcacagttttcggggggtctttatctgagacacatgctcagaaaatttgtaaaatcatggatatggccatgcagaatggggcgccagttattggtatcaatgactctggaggcgcgaggatccaagagggtgtagcgtctcttgctgggtatgccgaagttttccaacgaaatgttatggcatctggagtaattccacaaatttcagtaataatgggtccatgcgctggtggtgctgtctattcaccggcaatgacagattttatttttatggtaaaggatagttcctacatgtttgtcactggtcccgatgtggttaaaacggtgaccaatgaagttataacagctgaggagttaggtggagcgtccacacatacaaaaaaatcctctgtagctgatggagcttttgagaatgatatcgaagcactggccgaaatcaggcgcttaatggacttcttaccattaaataatcgtgaaaaagctcccgtgcgacctttttttgatgacccaggtcgagtagaactatcacttgatacgctaatacctgaaaatccaaacactccgtatgatatgaaatgaa

SEQ ID NO: 319700 - DNA, 1534 bp, Unknown
  Bacterial polypeptide expressing nucleotide sequence isolated from the Sargasso Sea
atgaaagaaaatattaaagaacttgaaagaaaaaaagctgctgccaaattaggtggcggtgaagaacgaataaagaaacagcatgccaaaggcaagctgactgccagagagagacttgaaattctcttggatgaaggatcgtttcaagaactcgacatgtttgttgagcatagggcagttgactttgacatggacaaacaaaagatcccaggtgatggagtcgtaaccgggtatgggaagatcaatggcaaactggtttatgttttcagtcaagactttaccgtcttcggtggttcgctttccgaaacccatgccgagaagatctgcaagatcatggatcacgcagtcaggaatggtgcgcccttgatcggactaaatgattctggtggagcaaggattcaagaaggagttgtttctctcggcggttacgctgaagtcttcaaaagaaatgtgcttgcatctggagtcattccacagatttcacttgttatgggtccttgtgcaggaggcgcggtctattcgccttcaatgactgacttcatattcatggtcgaagacagctcgtacatgtttgttacaggaccagacgttgtaaaaacagtcacgcatgaggaagtcacagctgaggaactcgggggagcatcgacacacagtcaaaaatctggagttgcagatttaacatttgagaacgacagagatgcactcctaatgacaagagaattcatgagctatcttccacaaagcaatcaggaatacccagagactattgaatgcaatgattcgatagaccgagaagaatcagcactcgatacattggtgcctcaagatccttccaaaccatacgatattaaggaagttattcataaggtggccgacgatggtgatttctttgaactccaaccgaagtatgcacaaaatattgtgactggttttattcggctcaatggttcaagcattggagtggtagcgaatcaacctttggtgctggcaggttgtcttgatatcaattcctcgatcaaggctgcacgttttgtcaggttctgtgacgcctttaacattccaatcttaaccttggttgatgttccaggctttatgccaggaacttcccaggaatatggaggaatcattaagcatggagcaaaactcctctttgcatatgctgaagcaaccgttcctaaagtgactttgattacccgaaaagcatacggaggggcttatgatgtcatgagttcaaaacacattggaggcgatatcaattttgcatggccttcggcagaaatagcagtgatgggacctaaaggcgcggttgaaattattttcagacaggatattggagacgacaaaaagattgaaaaacgaacacaagaatatactgaaaaatttgccaatccgtttatagcggcaagcagaggatacatcgatgatgtaatcatgccgaacaattctaggaaaaaattaatcgagtcattcgaaatgcttaagaataagcaacaggaaaacccctggcgtaagcacgacaatatcccactctagg

SEQ ID NO: 319701 - DNA, 1552 bp, Unknown
  Bacterial polypeptide expressing nucleotide sequence isolated from the Sargasso Sea
atgacgattcacgagaagcttcaaaggcttgaagaaatgggtcgagaggcccaagagggcggcggggccgaacgaattaaggctcagcgcgaacgaggcaagctgtctgctcgagagcggttagatctgctgttggacgagggttcattcgtggagcttgatcgtttcgttacgcataggtcgagtgacttcggactggaggaaaagaagatcctcggcgatggggtcgtcactggatatggcacgatccatggacgcctagtctttgcgttcagccaggacttcacggtctttggaggctcgctttcagagacacatgcggaaaagatcgtcaagcttcaggatatggcgatgcgtaatggcgccccgattattggactgaacgattcgggaggggctcgcatccaagagggtgtggtaagtcttggtgggtacgctgatatctttctcagaaacacgatggcgtcgggggttatcccccagatcagtgtcatactcggaccctgcgccggaggcgcggtatactcacctgcaataactgactttgtgtacatggtgcgtgggaccagctacatgttcgtgacgggtcccaacgtggtgaagacggtgacccatgaagacatcgatatggaggggctcggaggcgctgatatacacgcctccacgtctggtgtggctcacttcgcgcgagactccgagccggagtgtcttgagtcagtgcgggagttgtttcagtacatccctcagaacaacagtgagacgcccccctcggcttccgggatagatccacacgaccggaaagacgagaaattgctcgaagtcgtgccggacaatccgaatcagccatacgatatgtgtgatgtgatccggagggtggtggacgacggtgagttctacgaggtgcatgaaaaattcgcaggtaacattttggtgggctttgctcatcttggcggacatgctgtgggcatcgtagcgaatcagcccgcggtgcttgcgggagtgcttgatatcgactcgtcggacaagggggcgaggttcgttcgattttgtgacgccttcaatatccctctgattgtgcttgaagacgtcccaggattccttcccggtgtggcgcaggagcacggcggtattatcaggaacggggcaaagctgctttacgcgtttgctgaggcaactgtgccaaaggttacagtcattacacgaaaggcatacgggggcgcgtacgatgtgatgaactccaagcacattcgtggtgatatgaatttctcatggcctcaggccgagatcgcggtgatgggcccaaagggcgcggtggaggttctgtttcgaaaagaaatcgcagaggcttcggaccccgaggcagctacggaggctcgtatcgaggagtaccgagaaaagttcgcgcatccgtatatcgcggcatcccggggttatgtagacgacgtgattgacccgcgggagactcgcccgcgtctgatctcggcgctcgacatgctccaaaacaagcgtgatgaaaatcctatcaagaagcacggtaacattccgctctaac

SEQ ID NO: 319702 - DNA, 1534 bp, Unknown
  Bacterial polypeptide expressing nucleotide sequence isolated from the Sargasso Sea
atgaaagaaaacataaaagaattagaaaaaagaaaggctgctgccaaattaggtggcggagaagagcggattaaaaaacagcatgccaaaggcaaactgactgctagagaacgactagatatcctgctagatgatggatcctttcaggagctcgatatgtttgtagaacacagagctgttgactttgatatggataaacaaaaaattcctggtgatggtgtggttacaggatacgggaagatcaatggaaagttggtttatgttttcagccaagattttactgtatttggtggatcactctcagaaacacatgctgagaaaatctgcaaagtcatggatcatgcggtgagaaacggagcacctctcattggtttgaatgactcaggaggcgccagaattcaagaaggcgtggtttcactcggtggttatgcagaagtcttcaaaaggaatgtgcttgcatctggtgttgttccacaaatatcgctcgttatggggccatgtgctggtggagcagtatattcccctgcaatgactgactttatttttatggttgaggatagttcatatatgttcgtaacaggtcctgatgtagtcaaaacagttacacatgaagaggttacggcagaagaactgggtggagcatccacgcatagtcaaaaatctggtgtagctgatctaacatttgaaaatgatactgatgccctattgatgacaagagagttcatgagttatcttccacagagcaatcaagagcatcctgagactattgagtgcaaagactcaactgaacgagaggagcctgcacttgatactttggtcccacaagatccttcaaaaccttatgatataaaagaagtcattcataaagttgctgacgaaggtgaattcttcgaacttcagccaaaatatgcacaaaatatcgtgacaggatttattcggcttaatggatcaagcattggtgtggttgccaatcaaccaatggtactggctggctgtcttgatattaactcctcaattaaggccgctcgttttgttagattctgtgatgcattcaatgtccccatcttaacccttgttgatgttccaggtttcatgccaggcacttctcaagagtatgggggaatcatcaagcatggcgcgaagcttctgtttgcctatgccgaagcaactgttccaaaagtcactatgattacgagaaaagcttatggcggagcttatgatgtgatgagttcgaaacacatcaggggagatataaattttgcttggccatctgcagaaatagctgttatgggacccaaaggtgctgttgagattatcttcagacaagatattggggatgaggaaaagatagaaaaaaggactcaggaatatactgaaaaatttgccaacccgttcattgctgcgagtagaggatatatcgatgatgtaatcatgccgcataattctagaaaaaaactgattgaatcatttgagatgcttaagaataagcatcaagaaaacccctggcgtaaacacgacaacatcccactctagg

SEQ ID NO: 319703 - DNA, 727 bp, Unknown
  Bacterial polypeptide expressing nucleotide sequence isolated from the Sargasso Sea
aatggttgaacaaaatgaaaatctaaaaaacctacaaaagaaggttgattccgctcttcaaggaggaggtcttgaaagaataaataagcaacataaaaaaggtaagttaacggctagggaaaggttaatggttcttttagatgatgattcttttgaagaatttgacatgtttgttgagcatagagagactgagtttggtatggcaaataataaaattccaggtgatggtgttgttaccggtcatggaaaaattaatggacggttagtttttgtatttagtcaagattttacagtttttggtggttcattgtctgaaacacatgcagaaaaaatttgtaaaattatggataaagctatgagtgttggtgctccattaattggaatcaatgactcaggtggtgctagaatccaagagggagtggcctctttaggaggatatgcaaatgtatttcaaaaaacaattttagcttctggtgtagttcctcaaatctctcttataatgggaccttgtgctggaggtgcggtttatgcgcctgcaatgacagattttatatttatggtaaataaaacatctcatatgtttgtaaccggtcctgatgtagtaaagactgttactcatgaggaagtttctcatgaagagttgggcggtgctacaacccatacaactaaatcatcagttgcagatttagcatttgatgatgatattcagactcttattcaagcaaga

SEQ ID NO: 319704 - DNA, 946 bp, Unknown
  Bacterial polypeptide expressing nucleotide sequence isolated from the Sargasso Sea
aatggataaaaacaaagagttagaaaagaaaagagaagaatctaaattaggcggtggtctatcaagaattgaaaagcagcacagccaagggaagcttagtgcaagagaaagaatctttttattattagacgaagggtcatttcaagaaattggagccttagtctctcacagatctacagactttggtcttgacaagaaaaaatttccaggtgatggagtagtgactggatatggatatgttcatggtcgattggtttatgtcttttctcaagatttcactgtttttggaggctcgttatctgaaagtcatgcttctaaaatatgccaggttatggacttggccttaaaaaatggagcgccattaattggtcttaatgactctggcggtgctaggattcaagagggtgttgtttcattagcgggttacgcagatattttttatagaaacacaagggcatcaggtgtaatccctcagatatcagtaattatggggccttgcgctggaggagcagtttattctcctgccttaacagattttgttttcatggttgaagacacttcgtttatgtttgttaccgggccaaatgttgtaaaaacagttactcatgaagaagtcagttctgaagatcttggtggtgcaatgacacatgctgaaaaatcaggggttaatcattttacatctccaaatgatcttgagtgcattagaagcgttcgtgatttggtttcttacattcctcaaaattattccgagttgccacctcaacgagaaaacggtaatgtttttgaagaaaataaattagaacgaatcaaaggaattgttcctgataattcaaacttgccatatgacattagagaggttattgattgtgtaattgatgacgacagcttcaaagagttcaatcggatttcgccaaaaatattgtcgttggcttttgtagaattgatg

SEQ ID NO: 319705 - DNA, 1093 bp, Unknown
  Bacterial polypeptide expressing nucleotide sequence isolated from the Sargasso Sea
caaaaaataccaggtgatggtgttataactggatggggtaccattaacggtagattggtatatgtttttagccaagacttcactgtcttaggtgggtctttgtcggaaagccatgcgaaaaagatttgtaagattatggatatggcagttcaaaatagggcgccagttataggattgaatgatagtggtggcgctaggatacaagaaggggttgcttccctcgcggggtatgcagaggtattcaagagaaatactcttgcatcgggagttatcccccaaattagcgtcattatgggcccgtgtgctgggggagcagtttactcaccagccatgacggatttcatttttatggtaaaaaacacaagctatatgttcgtgacaggtccagatgtagttaaagctgttacaaatgaggtggtaaccgcagaggaacttggtggagcaaaaacacacaccagtaaatcaagtgttgctgacgccgcctatgacaatgatattatcgtactcaaacaagtaagacggttttttgatttcattccacttaataatactgataagtgccctgcaataaaagtatatgactcgatatatcgctcggaaaattctcttgatacgttggtccctcaaaatcctaatacaccatatgatatgaaggagttgatcctgaaaatagctgatgagaatgacttctttgaaattcagaaggaatttgctagaaatattcttgttggttttataaggataaacggatcaacggttggagttgtcgcaaatcagccaatggtgttagcaggatgccttgatatagatagttcccgtaaagctgcacgatttgttcgcttttgcgatgcgtttgagataccgatattaacatttgtggatgttccagggtttcttccgggtacatcacaggaatatggaggtgttataaagcatggtgcgaaacttttgtttgcttacgcagaagctacagtgccgaaagtgacggttattactagaaaagcatatggtggtgcatatgatgttatgtcttctaagcacctcagaggcgatttcaattatgcatggccaaccgctgagattgcggtcatgg

SEQ ID NO: 319706 - DNA, 1141 bp, Unknown
  Bacterial polypeptide expressing nucleotide sequence isolated from the Sargasso Sea
atgaacgatattttaaccgaacttgaaaatagaagagccgaagcccgattaggcggcggcaagaaacgtattgatgcgcaacacgcaaaaggtaaattgacagcgagggaacgcgtcgaaattttattagatgagggatcctttgaagaatttgatatgtttgtggtccaccgttgtgaagattttggaatggctgaccaaaggccggctggtgatggagtcgttaccggatggggaacaattaatggccgcatgatatatgtattttcgcaggactttacagtctttggtgggtcgttatctgaaacacatgctcggaaaatatgcaaaattatggacatggccatgcaaaatggggcgcctgtaatcggtattaatgactcgggaggggcccgtattcaagaaggtgtagcatctcttgctggttatgctgaagtttttcagcgtaacgtaatggcatcgggagtagttcctcaaatttcagtaataatgggtccatgcgctggtggtgctgtctattcaccggcaatgacagattttatttttatggtaaaggatagttcctacatgtttgtcactggtcccgatgtggttaaaacggtgaccaatgaagttgtaacagctgaggagttaggtggagcgtccacacatacaaaaaaatcctctgtagctgatggagcttttgagaatgatgtcgaagcactggccgaaatcaggcgcttaatggacttcttaccattaaataatcgtgaaaaagctcccttacgacctttttttgatgatccaggtcgagtagaactatcacttgatacgctaatacctgaaaatccaaacactccatatgatatgaaagaattgatagttaaggtggcggatgaaagcgatttttacgaaatacagaaagattttgcgaaaaacataataattggtttcattcgtctcgaaggtcagacagttggcgtcgttgctaatcaaccgatggtgcttgctggttgtctcgatattgacagttcaagaaaagcagctcgttttgtaagattttgtgatgcctttgaaattcccattttgacattggttgatgtgccggggttcttgcctgggacatctcaggaatatggtggcgttattaagcatggcgcta

SEQ ID NO: 319707 - DNA, 1468 bp, Unknown
  Bacterial polypeptide expressing nucleotide sequence isolated from the Sargasso Sea
tcgcatagaagcccaacattcgaaaggaaagttaacggctcgcgaacgaattgaaattcttatggatcaggatagtttcgaagagtttgacatgtttgttacgcatcgttgtactgattttgacatggaaaaatctaaaactgctggtgatggtgttgtgacaggctggggcactataaatggtagactggtgtacgtttttagccaagattttacagtttttggcgggtcgttgtctgaaacgcatgcgcaaaaaatctgtaaaataatggatatggcaatccaaaatggagcaccggtcattgggcttaacgattctggcggcgctcgaattcaagaaggcgttgcgtctcttgctggttatgcagaagttttccaacgcaatgtaatggcctcaggagtaatccctcagatatcagtgatcatggggccgtgtgctggtggtgctgtctactcacccgcgatgaccgactttatatttatggtaaaagatagctcttacatgtttgtgactggcccagatgttgttaaaacagttactaatgaggtagtaactgctgaagaacttggtggtgcatcaacccatacgaagagatcatctgttgcagatgcagcatttgaaaatgatattgaagctttgtttgaagtacgtaggctcgttgacttcttacctttaaataatcgcgggaaagtacccgtgcggccattttttgatgacccaaataggatagagtcttctttagacacattaataccggataatccaaataccccgtatgatatggaggagttaattgaaaagttagctgatgaaggtgatttctatgaaatacaaggtgaatttgcaaaaaatataattacgggttttgttcgcttggaaggtcagacagttggtgtcgttgcaaatcaaccaatggtgttagctggatgtctggatattgatagttcgagaaaagcggctcgatttgttaggttttgtgatgcatttgaaatcccaatcctaactttagtagatgttccaggatttctaccaggtacgtcacaggaatatggtggcgttatcaagcatggtgccaaattactatttgcttacggcgaagcaacggttccaaaagttactgttataacgcggaaagcctacgggggagcatatgacgttatgtcatcgaagcatctaagaggagactttaattatgcatggcctactgctgaaattgccgtgatgggtgcaaaaggtgcaacagagataatccatcgcgcggatttaggtgataaggaaaatatttcaaagcatgctcaagaatatgaggatcgcttcgcgaacccatttatcgcagcggaaagaggctttatagatgaagtaattcaaccacgctccactagaaaacgggtatcccgtgcgtttgcagctttgaggaataaaaaattaattaatccgtggaaaaaacacgataatattcctctctaa

SEQ ID NO: 319708 - DNA, 919 bp, Unknown
  Bacterial polypeptide expressing nucleotide sequence isolated from the Sargasso Sea
atgttgcaaaagaatgggtttgaatttcaagttcctgttttctcatgcatgttagcccatgatggagcaaaacacccaaagaaaataaaaggcgattgtcttgttgaatataaatatgatggagttagggtaatagcaattgttaaaaataataaagcaacgttatatagtagaaatggaaagatattttataattttcctaatattgaaagtgctttaagcaaaccagaatataacaatacagtatttgatggcgaggttatgagtgatgattttcaggcccttatgaagcaagtctatagaaaatctggtgcacaaactgatgatgcttatttagctttattcgatatacttcctttaaaagagtttaataatggaaaaagtaaattaaattcaattgatagaaaaaaagaattaaatcaactatcaaaaacctttgaagatgtaattaaattagtggattatgaaataataaattttgataatgaaaatggtcaaaataagttttcaatcatgaataaagaagctcttgataaaggttttgagggattaatgattaaaccaaatgaaaatttttatgaatgcaaaagaagccatgcatggttaaaaataaaaccatttatagaagtaactttaaaaattattgatatacaagaaggaacaggaaagcatgaaggtaaattaggcgcatttcatgttgagggcaatgatgatggtaaattcttttctttaagtgttgggagtggccttactgatgaagatagagaaaaattttgggcctcaaaagataatcttattggaagacttgttgagataagagctgatgcagtcacacaaagcattgaaggagagcactatagccttaggttcccaagatttaaaaactttagaggcttcaaagaagatgagaagatataaa

SEQ ID NO: 319709 - DNA, 1288 bp, Unknown
  Bacterial polypeptide expressing nucleotide sequence isolated from the Sargasso Sea
aatgaatgatccatggaaaattatcaaagaattagaaagcgataatagccgtttatttaaagagggtgttgttgaaaataatttgaataatatagatttccaagaaggtctttcaatgtgcttagatccacttataacctttggagtaaaacaagttccagaatcagaacaagatggagatggcttgaaatgggatgactttaagaaagatgttgatctattaattgaaagagaaaaaacaggtcatgcagctagagatttaataattgacttaatgagttctgctaaaaaagatcaatggaatgattggtatagaagaatattaattaaagatcttaggtgcggcgtgagtgagaaaactgtcaataatgtggcaaaaagaatggatttagaatttaaagttccaattttttcatgcatgcttgcccatgatggtgcaaaacatccaaaaaagataaaaggaaattgtttagttgaatataaatatgacggagttagagtaatcgctatagttaagaatggaaaagcaaccttatatagtcgtaatggaaagatatttcataatttcccccatatcgagaatgctttaagtaaatcagaatacaataatattgtatttgatggagaggttatgagcgatgatttccaagctttaatgaaacaagtttatagaaaatcaggagctcaaacagatgatgcttatcttgctctttttgatattcttccattaaaagaatttaatgaaggtaaaagtaaacttagttcaattgaaagaaaaaaggaattaaataagttatcaaagagttttgaaaatgcaattaaattagtagattatgaagtaataaattttgatgaaaagaatggtcaggataaatttgcaagcatgaataaagaagctctagaaaaaggcttcgaaggcttaatgatcaaaccaaatgacaattattatgagtgcaaaagaagccatgcttggttaaaaatcaaaccttttattgaggttactttaaaaattatagatattcaggagggtgctggaaagcattccggtaagctgggcgcatttcatgtagagggtgatgatgatggaaaattcttttcattaagtgtaggcagcggtttaactgacgaggaaagagagaaattttgggcatcaaaagacaaactaataggaagacttgttgaaattagagcagatgcaataactcaaagtattgaaggagaacattacagcttgagattccctagattcaaaaattttagaggttttaaaaaagatgaaaaaatataa

SEQ ID NO: 319710 - DNA, 976 bp, Unknown
  Bacterial polypeptide expressing nucleotide sequence isolated from the Sargasso Sea
gatgctggcccacccgataaatatagaaaaggactttgaaggtctagatccaaacaattatcaagctgaatggaaatgggatggaattagggtgcaggctgtttttgatgactctaataaacggcttttttcacggacaggcgatgatatatccagggcttttccagatattgtctccgaactaaacggacgagccgtcttagatggagaactgcttgttgggaaaaatttcgcggctcttccattcaataaactgcaacaaaggcttaacagaaaatcacccgcaaaggtacatctagatgcttatccggcatttattcgagtttacgatatgctattttgtaataatgaagatattagagatttaccccttcaaagcagacgtcaaaaattagaaggctggctaggacggactagaaatagtcgactggatatttctgaaattctatcctttgatagctgggacagcttggctgaactgcgaacagaaaaagctgaaactcttggtcatgaaggcgtaatgataaaaaatctccaaagtaaatattctgcgggacgcccaaaaggtttgtggtttaaatggaaacgcgatccaaaatatgtcgatggtgtaatgatgtacgcgcaaagaggacacgggcggcggagctcattttattcggactacacatttgggatctggcgagggaatgaattagtgccggtcgggaaggcgtattcgggttttacagacgaggaacttttggagctagacaaatgggttcgtgccaacaccctgaaccgttttggccccgtgagggaagtaaaaaaggagctggttgtagagcttgcctttgacagtgcacatgaaagcacccgccacaaatctggagtggctctccgctttccacgcgtccaccggatacgctgggataagccagcgcaggaagctgacacaatagaaacaatccaatcaattataaggcccgaaaattga

SEQ ID NO: 319711 - DNA, 1057 bp, Unknown
  Bacterial polypeptide expressing nucleotide sequence isolated from the Sargasso Sea
gatggttccactgggagaaaatgttactaagaatattaaaacaataaaatctattccactaaagcttcacgggaaaaatattccagatattattgaaattcgtggtgaagtatttatttctaaaaaaggttttttatcaataaattcttccgaaagtgaaaaaaaatttgcaaatgcaagaaatgctgctgcaggaagtttaagacagcttgattcaaaaatagctgcaagtaggcctttggatgctttcttttacgctattggttttacatctgacaatattaaaattaatacacagtcagaaattttagaacaattaaaaaattggggttttaaaatatgtaattttaatgagcgggttactggtatggatgggtgtgaaaaattttataaaaaaatttattcaataagagattcgattccttacgatatcgatggaattgtttataaagttgataatttaaattatcaagaggcgcttggttatgtttcaagggctcctagatgggctatagcacacaagtttccagcagaagaaaaatcaacttttatagaggatgtgagatttcaggttggaagaactggagtattaactccagtggcaagcttaaagcctgttgaggttggtggagtaattataagaaacgcaacccttcacaatatggatgaaataagaaaaaaagacatacatattggtgataaagtttcattaagaagagcaggggatgtaataccagaaatagtaagcgttatttcaaaaaataaattaagaaaaaaaataaatttgcctaagaaatgtccttgcccattagcttcaaaaattgagaaggaaaaaggtatggcttttgcaaaatgtactggttctaagagttgtcctgctcaaaagaaaggagctattattcattacgtaagtaagaaggcaatggatatccaaggagtcggagaaaaattaataaatcgtttagttgatgaaaatatattggatgatgtgtctgatctttataaattaaataaaaaaatattaggcgactttgttatgagtacagcaataagagaa

SEQ ID NO: 319712 - DNA, 1088 bp, Unknown
  Bacterial polypeptide expressing nucleotide sequence isolated from the Sargasso Sea
gctttcattggataatgttttctcaatggatgaattaatgtcatttgaaaaaagaattaaagataggctctccttaatagaagacattgagtttatcgctgagccaaagtttgatggtgttgcagttaatttagtatatgaatctggaaaattatcttatgcaacaacaagaggtgatgggaaaacaggagaggatgtgacacacaacatcctaacgatcaaatcgatacccataaaactcaatacatcatatccacctgagaagatcgaaatacgaggtgaagtcattatttcaaaaaatgattttgagaagatgaatcgagaaaatgaagctaagaatctaaaggtttttgcaaatcctagaaatgcagccgctggaagcatacgacaactagatcctaatattgcaaagagtaggccattgcgtttttatgcccatggatatgggtttctttctaacgaaaatgatttcaacaatcatagtgatgtcatcaaatatctaaatgattcaggaattgtgatctcaccactttcgcaaatagtaactggctctgaagaatgtgataaatactatcagaatatcaattctactagggattcgcttgatttcgaaatcgatggtgttgtttataaggtcaataaaatttcttatcaaaaagaacttggttttgtctcaaaagcaccaagatgggcaattgctcataagttttcttctgttgaggttgaatcaaaaatattagatgtagatttccaaataggcaggacaggaacaatcacaccagttgcaaaactggatccgatcaatgtaggtggcgtaatagttagtaatgcaactctacataatatggatgaaatcagtcgaaaagatattcgcaacggtgatcatgtatttgtaagaagagccggggatgtcataccggagatcgtttctgttaataagaaaaaaagaagtcagcaaacaaaaaaaattgtcttcccgaaaaactgtccttcatgtggttcagaaattgttagaaaagatggggagagtgctgctaaatgtactggtgggagtgtctgccctgatcagataaaggaaggactaaaca

SEQ ID NO: 319713 - DNA, 940 bp, Unknown
  Bacterial polypeptide expressing nucleotide sequence isolated from the Sargasso Sea
acaattaaaaatattccaaaaaaaaataaataaaacagattttccaaaagttttagatgtaagaggagaggtatatatatctaagtctgattttaaaaaaattaataagcaatttgcaaacccacgaaatgctgcgggtggctctctaaggcaaaaagaccataatgaaacaaaaaagatacctttaaaatttgttgcttatggctttggtatagttgaaccaaaaaattttaaaacacaatctgaatatttaaacttactaaaaaaatggggttttgaaacaaactctttaaatacgcttgtaaacacaattgaggatatagaaaagaatcataaaacgatcgaggcaaaaagatcagtcattgattatgacttagatgggttggtttataaagttgatgatttgaaactacaaaatagacttggttttgtttccaattctccaagatgggcaatagcccacaaattttcttctgaaaaaggattttcaataattaaaaatattgaagttcaaattggaagaactggtgcactgactccagtcgcaaaaatagaaccagttaacattggaggagttgttgtttctaatgctacgcttcataatgaagacgaaataaatagaaaagatattagaataggtgatgctgtatgtattcaaagagcaggagacgttatcccgcaagttttatatgttgataaggataaaaggaataaaaatataaaaaaatttaattttcccaacaattgtccttcatgtggatcaaaaacaataaaagagtttaattatagtacaaaaaaaaaggatgtcgttactagatgtccagatccaaagtttaattgtgcagaaattttaagagaaaaattaaaacattttgtatcaaaagatgcattaaatattgatggttttggaaaaaagatagtccaaaacttttgggattta

SEQ ID NO: 319714 - DNA, 661 bp, Unknown
  Bacterial polypeptide expressing nucleotide sequence isolated from the Sargasso Sea
tatgaaagatattgaattaaaaattagaaaactaatagatgaaataaactttcataactatcaatatcatgggatggatgatccaaaaatatcagaccgagattttgatcaaatggtcagagctcttcatgatttagaaaagaattatcctcagcttattcaagctgattctccaacacaaagagttgggtcaaaacccatcgatcgttttattcagattgaccatttaacaccaatgctttcattagataacgttttctcaatggatgaattaatgtcttttgaaaaaagaattaaagataagctctccttaatagaagacattgagtttattgctgagccaaagtttgatggtgttgcagttaatttagtatatgaatctggaaaattatcttatgcaacaacaagaggtgatgggaaaacaggagaggatgtgacgcacaacgttctaaccatcaaatcgatacccataaaactcaatacatcatctccccctgagaaaattgaaatacgaggtgaaatcattatttctaaaaatgattttgagaagatgaatcgaaaaaatgaagctaaaaatataaaggtatttgcaaatcctagaaatgcagcagcaggaagcatacgacagctagatccgaatattgcaaagagcagaccatta

SEQ ID NO: 319715 - DNA, 985 bp, Unknown
  Bacterial polypeptide expressing nucleotide sequence isolated from the Sargasso Sea
gacgccgaatgggacatgttgatgagagaattggttgggctggaagaccagtacccccatctacgtacaatggattctcccactcagaatgttggtggatcaccttccaagattttttctccggtaactcacagagtccccatgatgtctctcgacaatgcctttgaggttgaagcacttgaccagtggaaaacaaggcttgaaaggaaattggcagcaggcacaaagattggtgatttagtatgtgaacttaaattcgatggactagccatctcagttcgttacgagcagggacggctagtgcaggctgcaactcgaggagatggcgtcgtcggagaagacgtcactcataacgttctgacaatttctgaccttccgcatgtgattcggggcgcaccacccatacttgaagttcggggcgaggtatatcttcgacgaagtgaatttcaaaaacttaatagagcagcaaaaaagaacgatggtaaagagtacgtaaaccctcgaaatgctgcagcagggtctttgcgtcaaaaggattcaagtattgctgcgactcggaacctttctttctgggcatatcagctaggtgaagttgaggaagggccagaacttgcttctcactatgaaacactagagttcctttcatccttggagcttccagtaaatgaaaatgcgaaattagtaaaagatatagctggcgcccttgggtatattcaagaattccaagaagcgagagattcactagattacgaatttgatgggatcgttatcaaagtggattcattgcttctacaagaagagttaggaaatacagcgaaggctcctaggtgggcagtggcctataagctcccagcggaggaacaggtaactactcttttagatatagaagtttctataggcgccgcggggtccgcgactccatttgcaagactcgaaccagtatttgtaggcggagtaaccgtatcaacagcgacgcttcataacg

SEQ ID NO: 319716 - DNA, 793 bp, Unknown
  Bacterial polypeptide expressing nucleotide sequence isolated from the Sargasso Sea
ccaattaatgactatgcgaacccagtaaataacactgacgaaatgaaaaaaaaccatttaaaactagaaaatctaggatcaaatttggattatgatgttgatggagtagtttataaagttaataatttagattttcaggaacgattaggttctaccgcaaactctccgcggtgggctatcgcatataaattttcatcagtaaaggcttcttcaaaaattacaaacattgtaattcaagtagggagaacaggagcaattacacctgtagctaaaattaatcctgtaactgtaggcggtgttgtagtttcaaatgcaacattacataatgaagatgaaattaatagaaaagatataagaataggggatacagtaacgatacaaagagctggagatgtaattcctcaagtactttcagttgataaagcaaaaagaggtaagaatagtaaaaaatttatttttcctacaaagtgtctttgtggtgctataacaaaaaaagaaacaagcattacaacaaaaaaaatagatgcagtaagaagatgtttaaaaggctatgaatgtgattttactgcaaaagaaaaacttaaacatattgtatcaaaagaggcttttgatattgaaggattgggaaaaaaggtaatagataatttttggaatttaaatttaataaaaacacctgctgacatttttagattagattatttaaaaattcgaaaacttgaaggatggggagaattatcaatcaaaaatttacaaaatgcaattgataaatcaaaaaaatataatgttagacaaa

SEQ ID NO: 319717 - DNA, 531 bp, Unknown
  Bacterial polypeptide expressing nucleotide sequence isolated from the Sargasso Sea
tatgaatcctgaaaaaaaagcaaaactactaagagaagaaataaataaagctaacaaactttattatgttgataatagtccgagtatgtccgatcaagaatgggataagaaatttcaggagttaattgcaatagaaaaagaatttccagaaactaaaacaaccgattcacctacacaaagagtcggcgcatctcctgcaaaaggttttaatgaacataaacatttattaccaatgctaagtttgggaaatgcatttaacgaaattcagataagagattggtatgaaagagtacttaagcttttagaaattgaaaatctagatatggtttgcgaattaaagattgatggtctagcagtttcaattttttatgagaacggagtcttaactaaagctgctactaggggaaatggggttattggagaagaagtaactgaaaatgtcaaaacgatcagatctattcctctaactttgaatggtaattatccggagaaatttgaaattagaggagaagtgtttttaccattatcaaa

SEQ ID NO: 319718 - DNA, 955 bp, Unknown
  Bacterial polypeptide expressing nucleotide sequence isolated from the Sargasso Sea
atgaatgaaataatatctagaattttcgagttagaaaaaataataaataatcataaccacaattattatgatcttgataaaaatttaattagtgattttgaatatgataaattacttaatgaactagttaaactcgagtctaaacatccagaattttatgatgaaaattccccttcaaatagagttggtggtggtctgtcagataaattcaactccgaatctcatgtttttcaaatgtattctttggataatacatattcaagtgaagaattagaatcttggtacaccagagtcgtgaaaattctcaatactgataattttgaattttgttgtgaattaaaatatgatggtgcttctgttaatttaatgtatgaagatggaaagcttataagggcacttactagaggtgatggaactcaaggtgataacataactaataatataaagacaattagatctgtaccaataaagctaaataatactattctaaataagtttgaaattagaggagaaataataataagaaatgattcctttgaaaaattaaacagaaagagagaaaaactaggagagccattatttaaaaatccaagaaatactgcatcaggaagtataaaactacttgactcagatgaagtagcaagaagacctctggaatgttttctttattcaatagtatcagaagaagttaaaataaaaaaccactccgagctactaagtatagccagaaaaatgggatttgatgttcctaaatatgaaagagttgtagatggattaaatggtgtaagggactatattgatttttgggacaaaaatagatcaagcttaccatttgaaattgatggaattgtaatcaaaataaataatatagattttcagaaaaaattaggttttacatctaagtttccaagatgggctattgcatataaatacaaagctgaaaattggcaacaaa

SEQ ID NO: 319719 - DNA, 699 bp, Unknown
  Bacterial polypeptide expressing nucleotide sequence isolated from the Sargasso Sea
gatgaaaaaaagtgaaattacaaaaaaatatttaaagaaaataaaattaattaataaatttaataaattttattttgagaaagataaacctatagtatcggatggagtgtatgatgatttaaaaaaagaaattttattattagaaagaaaatacatttttttaaattccaaaaattcaccatctcaagttgtaggtcataagccatctaaaaactttaaaaaagtacaacacaaggttccaatgttgtcattatctaatgcttttacagaagaagatttaaaaaattttgaaaaaaaaatttctaattttctttcgaaaaaaaacgattttaaaattttttatagtgctgagccaaaaattgatggtatttcagcttcattaacatataaaaacggtaatcttataagaggcctgtcaagaggagacggtaaagaaggtgaagatataacagataatttaattaccattaaagatattccaaaaaaaatattatcaaaggattttccagaagaaatagatgtaagaggagaagtttttattcaaaatagtgattttgagtatttaaaagataagtttgcaaatcctagaaacgctgcctctggctcattaaggcaaaagaattcgggagataccaaaaagataccattaaaatttattgcttatacttttggttttgaaaatggtttaaaagctgaaaa

SEQ ID NO: 319720 - DNA, 778 bp, Unknown
  Bacterial polypeptide expressing nucleotide sequence isolated from the Sargasso Sea
atgaaaaataggaatttaattaaaaaagaatacctcactaaaataaataaattaaaagaacacaatcagctttattacgaaaaaagtaaacctaaaatatctgatgcagaatacgatgaactaaaaaaagaaattattgaacttgaaaaacaatatgactttttaaaaagtaaaaattctccatcctcatctattggtgcaaagccatcaaaaaactttatgaaatccaaacatagggtaaagatgctttctttatcaaatgcatttgatcaagaagatttaaaaaattttgaaaaaaaaatatctaactttttaaacttaaaagaaagtactgatattgagtatagcgttgagccaaagatagatggaatttcagcatctttaaattataaaaataataatttagttttaggtttatcgagaggagatggcattgaaggtgaaataattactgaaaatttaaaaacaattaaggatattccaaaatttataaaagataaaaaattccctaaagaaatagatataagaggcgaggtgtatatcggaaaaaatgattttgaaaaaataaaagatcgatttgcaaatcccagaaacgctgcatcaggatctcttagacaaaaaaatccaaatgaaacaaaaaaaattccattaagatttattgcctatacatatggattttgtagtgaaatcaattttaaaaagcagtctgaatttttaaatcttcttaaggactggggttttaaaacaaatagttataataaagtcattagtggcattg

SEQ ID NO: 319721 - DNA, 376 bp, Unknown
  Bacterial polypeptide expressing nucleotide sequence isolated from the Sargasso Sea
ttggaccttttttcagccccaacgcccgtggataaagcgcagccagctatcaaaataaaagcactgcgcgaccagctcaacacctgggcgcaccagtactacgtgctggacgagcccaccgtgcccgacgccgaatacgaccgcgtgttccgcgaactgcaggcgctggaggctgagcatcccgatctcatcacgcccgattcgcccacccagcgcgtgattggcgcggtgatggagggcctggcccccgtgcgccacgcggtgcccatgctcagcatccacaccgagacggacaccgaggccacgggcgcgcaggcgtttgacgcgcgggtgcggcgcgagctgggcctgtccgagtcggaccccgccatcgaat

SEQ ID NO: 319722 - DNA, 652 bp, Unknown
  Bacterial polypeptide expressing nucleotide sequence isolated from the Sargasso Sea
atgaataagaatataaaaaaaaactaccaaaaaaaaataaatgaatttaagaaccataataaattatactatgaaagtagttctccaaaaatttctgataaagcttttgataagctaaaaaaagaaatattagaattagaaaaaaaatacacttttttaaaaagtaatttttctccatcacaagcggtaggttttaagccatcaaaaaattttcttaaatttaaacatcgtcaacaaatgctatcattatcaaatgcttttaatgaagaagatttactaaattttgaaaaaaaagtattaaatttcctaaatgaaaaattttatttagaatacagtgttgaacctaaaattgatggaatatcagcttctttaacctataaaaatggtttacttacctatggagtatcaagaggggatggaaaagagggagaaataattacagaaaatttaaaaactattaaggatatacctcataaagttgaaaataataattttccaaaagatatagaaattagaggagaggtttttataaataaaaatgattttgaaaaaattaaagatacttttgccaatcctagaaatgcagcatcaggatctttaagacaaaaaaatcctgaagaaacaagaaaaatcccattaaactttattgctt

SEQ ID NO: 319723 - DNA, 376 bp, Unknown
  Bacterial polypeptide expressing nucleotide sequence isolated from the Sargasso Sea
atgaaagacttattaaaaaaatacgaacaacttaaagaggaaattcagcttcacaattacaattatcatgccctagatgacccaaaaatatcagatagtgaatacgacaagctctttcgagacttgcttaatttagaagaagaaaatcctcaccttgtgactccagattcaccaactcagcgggtaggattttctccaatagatgaatttgaaacatctgagcattctgtaccaatgctctctttggctaatgtatttagtgaaaaagagtttttagatttccatgaccgtattttaaaacgtcttgtaaataaaaatgattttgagtacttctgtgagcctaagatggatggagcagccagtatcactaattaca

SEQ ID NO: 319724 - DNA, 703 bp, Unknown
  Bacterial polypeptide expressing nucleotide sequence isolated from the Sargasso Sea
ctaaagttagaaaaaaaatctaaatttgcaaatccaagaaatgctgcagctggtagcttaagacaacttgatgtttctattagtcatagtagaccacttaaattcatacctcatggcatagggaaatgttcctataattttgataaaattgagaattattatgatcaactaaagagttggagtattactcctaataatataagcaaaaaatgtaactcagttgaagaaattattaatttttataatcaaattaatcaaaaaagatcaggtattgattatgatattgatgggttagtagtaaaaataaacagttttaaactacaagaaagattaggttatgtaggaaaaaatcctagatgggcagttgcccttaaattttctgctgaaaaagctaatactataattcaatctgtagattaccaagttggtagaactggagcaatcacaccagtagctagattgcaacctgttaatttaggcggtgtcattatatctaatgcttctttacataattttgatgaaattaataaaaaaaatataaatgtttcagatctcgttgaaattgaaagagcaggagacgttatcccttatgttactagattagttaataaaaatagtaaattaaatactaaaataaaacctcctaagacttgtcctatctgtaagagtaatgttttaaaagaaaaagatgaagcaatactaa

SEQ ID NO: 319725 - DNA, 820 bp, Unknown
  Bacterial polypeptide expressing nucleotide sequence isolated from the Sargasso Sea
atgaaatggttagaaaaaaataatattattacagtgaagaatactaaaagtaaaaaaataaataatgaatacttatcagaattactagtagattggcgttcaacatataaatatgaaattgatggtattattgtcatcaatgataaaatatatcccagagaaaataaaaatccagcacatgcatttgcgtttaaaatggtactttcagaccaagttgcggaagtcaaagttattgacgttaattactccattagtaaatatggttatttgaaacctgtaatacaaatagaaccagttcatattcgcggcgcggatattgaatttgctactgcccataatattaaaaatgttattgataataacataggtattggtgcaatagtacaattaagtcgtagtggcgatgtcattccaaaaatagaaaaagttatagttcctgcggaagaaccaaaattaccagatgttgcgtggaaatggaatgaaacacatgttgatgcacttttaaaagattctgcttctaatgaagaagttagaaataaaaatattatatcattctttgcaaaattaaatacgacaggatttggtccgggaaatattacaaaggtaattgagcacggttttgatactattccaaaaatactgaaaatgtccattgaggattttgaagaaatacctggtttccaaataactacagcaaaaaaagtatataatggtataaaagataagattgataatgtttctttgtcagtattaatggatgcaaccaacatatttggccgtgggatgggagaatctcgtattagtgcagtattagatgtct

SEQ ID NO: 319726 - DNA, 744 bp, Unknown
  Bacterial polypeptide expressing nucleotide sequence isolated from the Sargasso Sea
aatgagtagctcagatataaaaaaaaaatactctttcaaaattaatgaaataaaaaggcataatcaattttattttgaaaaaaataatccaaaaatatcagacagagagtatgataaccttaaaaaagaaattattgaattagaaaaaaaatataattttttaaacaatcaagattccccatctaaatctgtaggctttaaaccttccaaacattttttaaaatctgagcatagagttccaatgttatcgttatctaatgcatttgatgaagaagatttaaataattttgaaaaaaaaatatttaattttttaaatttagataaaaatacaaagttagaatacagcgtagaaccaaaaatagatggaatttcagcatctcttacatacaaagatggagcattaattaaaggattatcaagagggaatggttttgagggtgaattaattacagaaaatctaaaaacaatttctgatattccaaaaaagcttaagagtaaaaattgtccaaaagatatagatataagaggtgaagtttttatagaaaataatgattttgaaaaaattaaagaaaattttgccaatccaagaaatgctgcgtctggatctctaagacaaaaaaatccaaatgaaacaaaaaaaattcctctcaaatttatagcttatacttttggttttataaaaaatttcaaacttgataaacaatcagattttcttgaatttttaaaagaatggggttttaagac

SEQ ID NO: 319727 - DNA, 615 bp, Unknown
  Bacterial polypeptide expressing nucleotide sequence isolated from the Sargasso Sea
aatgaaaaataaaaatttgataaagaaaaaatatttatcaaaaatacaggagttaaaaaaacataatagactttattatgacaaaagcagtcctgaaatatcagactctgaatatgatcaactaaaaaaagacataatagaattggagaataacaatagttttttaagaaataaaaaatcacccactctttcggttggaacaaaaccttcaaaaaattttttaaagtctaaacaccgaattaaaatgctctctttgtctaatgcatttgatcatgaagatctgataaattttgaaaaaaaaatatctaattttttaaatttaagtgaaaataaaaactttgaatatagtgttgaacctaaaatagatggaatttcagcatcattaacttacaaaaataataatttggttttaggattatcaaggggagatggtatagaaggtgaaataattactgaaaatttaaaaactattaaagatatcccaaaaataattaaagataaaaattttcccaaagatatagatataagaggagaggtatatataggtaaaaaggattttgaaaaaataaaagatcgttttgcaaatccaagaaacgcagcctcaggttcgcttag

SEQ ID NO: 319728 - DNA, 895 bp, Unknown
  Bacterial polypeptide expressing nucleotide sequence isolated from the Sargasso Sea
aaaaatgtgttaggaataattggtatacctaaagttttaaaaaattgtaaatctaatcttatagagataagaggggaggttttttttataagaaaagatttcgaaaaattaaacaaagaatttgaaaaaaaaaaacaattttcaaatcctaggaatgctgcctcaggatctcttcgcctaattaatagcaaaatgactaaagatcggcctttgaggtttataccgcatggatatggtaaattatcttatgaaaaagagtttttaaactttgaagattttttaagtttttgtaaaaaaaataattttaataaaacaggttatgctaagaaatacagtaatttaaaagatgtacatgattacatctcagaaattgagaaaaaaagatcctcaataaattttgatattgatggaatggtaatcaagattaatgacttaaatttacaaagaatgcttggtagcacaaataaatttcccagatgggcaattgcagctaaatttagttcagaagaagcattaacacaagttgaaaaaatagagctacagattggtagaactggggctattacacctgttgcaagattgaagccaattaatattggaggtgtagttgtatcaaatgcaactcttcataattttgatgaagttattagaaaagatataaggattgatgattttgtttgggttaaaagagccggagatgtaattccatatatcacaaaagtagatatagaaaaaagaaaaaaaactaataaaaaatttgttgcaccaagtaaatgtttatgtggatctaaaattattaaaattgaagatgaagcagttcaaagatgcagtgctggaaaaaatgaatgcaaatatcaaaaattagaaaattttaaacactttgtatccaaaaaag

SEQ ID NO: 319729 - DNA, 644 bp, Unknown
  Bacterial polypeptide expressing nucleotide sequence isolated from the Sargasso Sea
tatgagtagggacaaagaaaaaataaaaaacttatatcaatcaaagttagaaaaattaaaaaaacataataaaaaatattatgaagatagtaatccacaaatcgatgattctgaatatgataagttaaaaaaaaatattttagatttagaagaaaaatacaaatttttaaaaaataaagactctccttcaaaaacagttggtttaaaaccatcaaaaatttttttaaaaagtaagcatcgtttaaaaatgctttctttatcaaatgcttttgatgaaaaagatttaataaattttgaaaaaaaaatttctaattttttaaaccttaaagaatataaaaatattgaatatagtgttgaacctaaaatagatggtatttcagcttcattaacttataaaaataatattttaaatttaggtttatcaagaggagatggtattgaaggagaaattataacagaaaatcttaaaactattaaggatattccaaaaaatattaatcataaaactttccctaaagatattgatatcaggggagaggtatatattgccaagaaggactttgagagcatcaaagatagatttgctaatccaagaaatgctgcttcaggatctcttcgtcaaaaagattcaaatgaaacaaaaa

SEQ ID NO: 319730 - DNA, 844 bp, Unknown
  Bacterial polypeptide expressing nucleotide sequence isolated from the Sargasso Sea
tacgatattgatggaatagtttataaagtaaataatttaaatttccaaaaaagacttggatctacttctaattcccctcgatgggcaattgcttataaattttcatcaattaaagctatctcaacaatcaatgatataattattcaagttggtagaactggagctataactccggttgcaaaaattaatcctgttacggttggtggagttgtggtttctaacgctactttacataatgaagatgaaattaatagaaaagatattagaattggtgataccgttacaattcaaagagctggagatgtaattccgcaggttttatctgtagataaatcaaaaagaaaaaaaaatagcaaaaagttttcattccctttaaattgtctttgtggttctccaacaaaaaaagaaattaatagatcaaccaataaaaaagatgcagtcagaagatgtactaaagggtacgattgcgattttacagctaaagaaaaattaaaacatttagtatcaaaagatgcttttgatatagaaggattgggaaaaaaagtaatagatagcttttgggatttaagctttataagaacaccagccgatattttttcaatagattatgaaaaattagagagattagaaggatggggagagctttcaataaaaaatttaaaaaaagcaattaatgattctaggaagataactttaagcaaatttatttactcaattggaataagacatataggtcaagaaaacgcaaaaattttagctgcgttttttaggacagataaaaaattttcagaattatttgacccagtgaaaagaaaacatattttaaagagcttagacgatctga

SEQ ID NO: 319731 - DNA, 810 bp, Unknown
  Bacterial polypeptide expressing nucleotide sequence isolated from the Sargasso Sea
gacttaaaaagagagataattgaacttgaaaaaaaatataaatatcttaagagtgatcattcaccctcaataaatatcgggtttaaaccatcaaaaaattttaaaaaagcaatacatagagttagaatgctttctttatcaaatgtatttagcaaggacgacctggtcaattttgagaaaaaagtatgtaattttttaaatttaaagcatggggcaaagattgagtatagtgtggaacctaaaatcgatgggatttctgcatctcttaattacaaaaatggaattttaatatcgggtttatcaagaggggatggcaacgaaggagagctgataacagaaaatttaaaaactattaaagatattccaaaaaaaattgatattcagggatttccaaatgatattgatattagaggtgaagtttttatcaccaacaaagatttccaaaaaataaaagaaaattttgcaaaccctagaaatgcagcatctggatctttgagacaaaaaaattcaaatgaaacaaaaaaaatacctctaaaatttatagcttataattatggttaccttgaggaattaaaaataaataaacagtcagagtttttagaaaaattacaactttggggatttaaagtaagtaaatttaacaaaattatttctggaataggtaatcttataaaaaatcatgaagaaattgaaaataaaagatatgaattagattatgatgttgatggattagtatataaaattaatagtatcgaactacaaaatagaataggatttttatcaaattctccaaggtgggcaaccgctaaa

SEQ ID NO: 319732 - DNA, 787 bp, Unknown
  Bacterial polypeptide expressing nucleotide sequence isolated from the Sargasso Sea
attggcgaacaaagattttgataaaataaaagattattttgccaatcctagaaatgcagcttctggttctttaagacagaaaaaccccaatgaaacaaaaaagatcccactaaagtttattgcttactcttacggacattttgaaaatattaattttaaaaaacagtcagaatttttgagtgcattaaaaagatggggatttaatacaagtgaatttaataaagtaataactggggtggacaacctatttactaaccataaagaatttgaaaataatagatttaaactagattatgatattgatggcctagtttataaaataaatgattttaaatttcaaaatcgccttggctttgttacaaatgcacctaggtgggctgtagctcataaattttctgcagaaagttctttttccgaaattttaaacattgaaattcaagttgggagaacgggagctttaactccagttgctaaaataaaaccggtaaacattggtggtgtaattgtttctaatgctactcttcataatcaggatgagattgaaagaaaagatattagaattggagacactgtaaaaatagaaagagcaggagatgttattccacatgtaatttcggttgacgtaaataaaagaaaaaaagaatcaagaagatttatttttcctgaaaaatgcccttcttgtgggtctaaagctataaaagaatataattttcaaacaaaaaaatatgatgctgttaaaagatgttccagcgaaggttatgaatgcgaaaaaatagcaatagaaaaa

SEQ ID NO: 319733 - DNA, 848 bp, Unknown
  Bacterial polypeptide expressing nucleotide sequence isolated from the Sargasso Sea
aatgtctaaaaataatgaaaaaaaaatagttttaaaattaaaagaattatcaaaacaaataaaaaaacatagtgatctatactataacttagataagccaataatatcagataaggagtatgataaactaattatagaaaataatattttagaaaataaatatcctcatctagtacttaataatagtccaaataaacttgtaggtgcaaaagtaaaaagtgaatttaaaaaaattgaacactattcacaaatgtattctttagcgaatgcatttgataaaaatgatattgaagaattctttaaaaggtcaaataaatttctaaatttacaaaataatttatttattgaaagcttttgtgagccaaaaatagatggtctttctttaaatcttctttataaaaatggaaaattagtatctgcaagtacaagaggtgatggaaaaattggtgaaaatgttactgaaaatatactaaatattaatgaaataccaaagaatttaaagaataattttcctgaaataattgaaattagaggtgaaatttttataaataaaacagattttgaaattataaattcaaatttaaaagataatgaaaaatttgctaatccaagaaatgctgcggcaggtagcttaagacaattagatacatctattagtcacagcagaccattaaaatttattgcacatggtttaggtaaaagctcaattaattttgatacaattgaagaatattattcaaatttaaaaaattggaaaataccattaagtgattttacaaaaaaatgtaattctattaaagatataatgctacattatgaggcaattaataataaaagagctaatttaa

SEQ ID NO: 319734 - DNA, 817 bp, Unknown
  Bacterial polypeptide expressing nucleotide sequence isolated from the Sargasso Sea
acatttaaaaaagtcaaacatagtgttccgatgctttctttaggaaatgcatttgataaagaagacttaataaattttgaaaaaaaaataattaattttttgagttttgaaaaaaataaaaaatttgaatacagcgctgaaccaaaaattgatggtatttcagcctctttaatttataagaacggtaactttatccagggtttatcacgcggaaatggagttgaaggcgaagatataactgaaaatttaaaaactataaaagatattccaaagaaaattaattataggaattttccatcggaaatagatatcaggggagaagtttttataaacaaaaaagattttgagaaaattgaagaaaattttgcaaaccctagaaacgctgcctcaggttcattgaggcagaaaaatgcatcggaaacaaaaaaaattccactaaagtttatagcttatacttttggttatgtaagaaattataaattacttaagcaaacagattttttggatgatttaagaaaatggggttttaaaacaaatagtttaaataaaaagatttcaggtatagaaaatttaataaaaaactacaatcagattgaaaatgttagatcggatctcgattatgatattgatggaatagtttataagattaacgatctaagtcttcaaaatagattaggattttcctctaacgcaccaagatgggcagtagcccataaattttcagcaaataaaggttattcaaaaattatcaaaatagatattcaaattggtagaactggtgctctaacacctgttgctaaaataaacccagttaaca

SEQ ID NO: 319735 - DNA, 623 bp, Unknown
  Bacterial polypeptide expressing nucleotide sequence isolated from the Sargasso Sea
gatgaaaaaaaaagatattcaaattttttatgaaaaaaaaattaaacagtatgaattttacaataaatattactatgaaaaaaataatccaaaagttttagactctgaatatgacaatttaaaagcggaaatattaaatcttgaaaaagaatacaattttcttaaatcaaataaatccccatcaattaatgttggttttaagccctctaaaaactttcaaaaagtacaacacaaagttccaatgctttcacttgcaaacgcttttagtgaagaagatttagaaaattttgaaaaaaaaattattaattatttatcaatagaaaaaggttttaaaatattttacagtgccgaacctaaaattgatggaatttctgcatcattaacctttaaaaatggaaaatttgtaattggtttatcaagaggagatggcaaagaaggtgaggatataactgcaaacttattaacaataaatgatattccaaaagtaattagttcaaaaaattttcctgaagaaattgatatacgaggtgaagtcttcatccaaaatagtgattttgaaaaattaaaagataaatttgcgaatccaagaaatgcagcctcgggctccttaaggcaaaaaatcc

SEQ ID NO: 319736 - DNA, 848 bp, Unknown
  Bacterial polypeptide expressing nucleotide sequence isolated from the Sargasso Sea
tcataatgtcaaaactatcaatgctattccattgcagctaagaaaatctgtaaaaaccccaacttttatggaagttagaggtgaaatttttatgaacatctcagatttcaacaaattaaataagtctagagaattattagaagaaaaactctttgcaaatgctaggaatgcagcagctggaagcgtaagacaacttgatcctaaaattactgcctcaagaaatctctcaattttttgttacgaaattggaggtagtgaagatattgagtttaataatcaagttgaaatgcttgactatttaaagtcaattggattacctgtaaatccaatatcaaaaaaaattacgtcagctaatgaaatgatcgcatatcatcacaccctagaatcaaatcgtaaccatatagattatgaaattgatggttcagttataaaagtaaataattataaaaaaagagagagattggggttaagatcacgttctccaagatgggctattgcagcaaaatttaaagcaaagcaagcagaatcacagattataggaattgatttgcaagttggtagaacaggagttattacaccagtcgcaaaaattaaagaagttgatttatcgggtgttatgatatccagtgctactcttcataatcaagatgaaattgatagaaaagatattagaattaatgattttgtattaattgaaagatcgggcgatgtaattcctaagattactcaggttctcaaaaataaaagacctaaaaatacaaaaaaattctcaattagtgattttaattggcctgatccagactgtaaaattgaacgtattgaaggagaagcggcatatagatgtatca

SEQ ID NO: 319737 - DNA, 795 bp, Unknown
  Bacterial polypeptide expressing nucleotide sequence isolated from the Sargasso Sea
aaccttgctaccattaaagattttccaaaaaagattatatctacagatttcccaaaagaaattgatattagaggtgaagtttttataaaaaatagtgaatttgaaaatataaagcataaatttgctaatccaagaaatgctgcctctggctctttaaggcaaaaaaatccagaggataccaaaaaaatacctttaaattttattgcttacacatttggttttgaaaaaggcctaaatgtagataatcaatttgaatatctatctaaattgaatgaatggggatttaagaccaatccattaaacagattaatttctggtataaaaaatttaattaaaaattacaacgaaatagaaaaactgagaaccaatttagatttcgatatagatggaattgtatacaaagttaatgaatttgttctccaaaaaagattaggaaatgttgctaatgctcctagatgggcagttgcacataaattttcttcaaataaggcagtatctcaaatcacagatatagaaattcaaattggaagaactggtgctatgactccggttgcaaaaataaaaccgataaatataggaggtgttttagtatctaatgcaacattacataatgaggatgaaataaacagaaaagatattagaataggagatactgttaccgtagagagagctggagatgtaataccacatattcttactgtagatttaataaaaagacctaaactaagttctaaatttatatttccaaaaaactgcccatcttgtggatcaaaaacaataaaagaattaaataag

SEQ ID NO: 319738 - DNA, 790 bp, Unknown
  Bacterial polypeptide expressing nucleotide sequence isolated from the Sargasso Sea
atgaataaggaagttgaaaaaatatataaaagaaagattaaagaattccaaaaacataacaaattatattatgacaaaagttccccagctatttctgataaagaatttgatgaacttaaagctgatataataaatttagaaaaaaaatattcttttctcagaagtacaaaatctccatctcattctgtaggttttaaaccatctaaaaattttgagaagtttaagcataaagtacaaatgctatctttgtccaacgcatttgatagagatgatcttattaattttgaaaaaaaaatcttaaattatctaaatgaaaaaatttcattagaatatagtgttgagccaaaaattgatggtatttcggcatctttgacttatataaatggcaatttaacttacggtgtttctcgaggtgatggcagtgaaggtgaacttataacaaacaatttaaaaactatcaaagatatcccacataaaattctaaaaaaaaatatccctaaggaaatagaaataagaggggaagtttttattgaaaaaaaagattttgaaaaaataaaggataaatttgcaaatcctcgaaatgcagcatcaggatcacttagacaaaaagatcctaaagaaacatctaagattccacttaaatttattgcttatacatttggatttataagtgaaaataaatttaaaaatcagtctgattttttgaatgagctaaagtcctggggatttttaacaagtgattataataaagtaataaaaagtaccgatgagttaattatacatcatgagc

SEQ ID NO: 319739 - DNA, 724 bp, Unknown
  Bacterial polypeptide expressing nucleotide sequence isolated from the Sargasso Sea
gatgaatgaaaaacttttaaaaaaagaatatcttaaaaaaatttcacaactccaaaaatttaatctggcttattatgataaaagcgctccaatagtagctgactcagaatatgacaagttaaaaaaagatattattaattttgagagaaaatatgattttttaaaaagtcccaactcgccgagcttaattgtgggatttaaaccatcaaaaaattttaaaaaaaagagacatagagttcaaatgctgtcattatctaatgcattcaataaagaagatctaataaactttgaaaaaagaataataaattaccttgataaaaaaaacgattttaaaattgaatatagtgctgagccaaaaatagatggtatatctgcatctttgatttataaaaaaggaaagtttgttactggattgtctagaggcgatggtaagcaaggggaagatataactgaaaatttaaaaactattaatgacatacctcaaaatatattagataaagattttccagaggagatagatataagaggagaagtttttataaaaaattctgattttaaaaaattatctaacaaatttgctaatccaagaaatgctgcttctggttctttacggcagaaggatccaaatgaaacaaaaaaaattccacttaagtttatcgcttatacttttggttttcaacgaaatcttcaaataaagtcacaaactgagttttctaaaaattaa

SEQ ID NO: 319740 - DNA, 538 bp, Unknown
  Bacterial polypeptide expressing nucleotide sequence isolated from the Sargasso Sea
agtggctaaacgaggtttggattcctttttatacagcgtctacatgaacagaaatcccattacgagccattaccaacaaattttaaatgccgaagaatggggctttaaggttccgcctattaaagaaaggtacatcgagaaatctgcttccgtagaagaaataatgaactttataaaccattgggatattcatagacacgatttgccttttgaaatagatggaatcgttcttaaagtaaataatgttcaccaacaaaatgaaatcggtgcaactgcaaaatcaccaagatgggcaattgcctataaatttaaagccgaaagagtagaaacgattttacaatcggtatcttatcaggttggtagaactggagcaataaccccggtagcaaatctagagccagtttctctaggtggaacgacggttaaaagagcttctcttcataatgcagatcaaatagaaaaaaacgatttgcatattggagacacagtataccttgaaaaagggggtgaaattattccaaaaattgttggtgtcaaa

SEQ ID NO: 319741 - DNA, 879 bp, Unknown
  Bacterial polypeptide expressing nucleotide sequence isolated from the Sargasso Sea
agtggaccatttaacaccaatgctttcgttggataatgttttttcgatggatgaattaatgtctttcgaaaaaagaattatagataagctctccttaaaagaagacattgagtttatcgctgagccaaagtttgatggtgttgcagttaatttagtatatgaatctggaaaactatctcatgcaacaacaagaggtgatgggaaaacaggagaggatgtgacacacaacatcctaacgatcaaatcgatacccataacactcaatacatcatctccccctgagaaaattgaaataagaggagaaataattatttctaagaatgattttgagaaaatgaaccgagaaaataaagataagaatctgaaggtttttgcaaatcctagaaatgcagctgctggaagcatacgacaactagatccgaaaattgcaaagtctagaccattgcgcttttatgcccatggatatggtttactctccaatgagaatgatttcactaatcatagcgatgtgatcaactatcttaatgattcagggattgtggtctcatcactatcacagctagtaactggcgctgatgaatgtggcaaatattatcagaaaatggattctataagaggttcgcttgacttcgaaattgatggtgttgtttataaggtcaataagatttcttatcaaaaagaacttggttttgtttcaaaagcaccaagatgggcaattgctcataaattttcttctgttgaggttgagtcaagaatcttagatatagatttccaagtaggtaggactggaacaatcacaccagttgcaaaattagatccaatcaacgtagggggtgttatggttagcaatgcaactctacataatatggatgaaatcag

SEQ ID NO: 319742 - DNA, 952 bp, Unknown
  Bacterial polypeptide expressing nucleotide sequence isolated from the Sargasso Sea
agaagacttgggttttatgttggaaaaaaaccctcgttgggcaatagcctataaatttgaatcagaaaaagcatatacaataattaaaaaaattgatcttcaagttggaagaacaggcgctattactccggtagcacgtcttaaacctataattattggtggagtaacagtatcaaatgcttcattgcataattttgatgaaatagataagaaggatataagagaaaatgacacagtagaaatagaaagagctggcgatgttatacctcgagtcataagagtttcaaaaaaatctaacaagagaaataaaaaagttatcgctcccaaaaagtgccctgtatgtaaacaaaatctttataaggaagaagatgaagctgttataaggtgtataaattattataattgtagcgctcaattagttgaaagattaattcattttgcttctaaaaaatcttttaatattgatggtctaggggaaaaacaaataaatcttttttggcaactaaaatatttaaataaaacttcagatatttttcgtttaaacacttatgaaaaaaaaataattgaattagatggttggggtgaaatttcttatttaaatctaataaatagcattaataagagtaaaactataaatttacaaaaatttatatattctcttggtataagatatgttggagaaataaattctcaaattttatcaaaacattttataaatattcaatctttcattaaaaatgcaaataatattgaaaatttaaacagtattgatggtttgggacctaaagcaatattatcaattacagaatttttaaaaaataaatataatctagatgaaattaatgaaatagcaaaatactgcaaaataatagattataaaaaaatcaattcaaataatccgtttaacaataaatcaataatttttactggaaaattaaccaatatgtctaga

SEQ ID NO: 319743 - DNA, 877 bp, Unknown
  Bacterial polypeptide expressing nucleotide sequence isolated from the Sargasso Sea
tatgaaagatattaaatcaaaaatgcgagtacttattgatgaaataaattttcataactaccagtatcatgggatggatgacccaaaaatatcagactatcaatttgataaattagtcatagaacttttagatttagagaaagaggatccgacacttatacaagtagattcaccgacccaaagggttggctcaagacccatagatggttttactcagattgatcatctaaccccgatgctctcactagacaatgtttttaacatggaagaattaatgtctttcgaaaagagagccaaagataaattatctttagaggataaaatagagtttatcgctgaaccaaaactagatggtgttgcagtcaatttagtatatgaatcaggaatattatcttatgcaacaaccagaggagatggaacaacaggtgaagatgttactcacaatgttcttacaataaaatcaatcccaataaaactgaaatcatcatcgccacccaaaacaatagaaattcgtggtgaaataattatttcaaagaatgatttcaagataatgaacagagataatgcaggtaaagagttgaaggtatttgcaaatcccagaaatgccgcggcaggaagcattcggcaactagatccaaatatttcaaaagacagaccattgaaattttatgctcatggatacggtttactatccgatgatgataaattctctacacattatgacgtcatgaattacctaaatgactcaggaattgtcatctctccttactcagaagttgtaattggtgctgaggaatgtgggaaatattatgaaaaaatcgattctcttagagattctcttgattttgaaatagacggcgtagtttacaaggttaat

SEQ ID NO: 319744 - DNA, 912 bp, Unknown
  Bacterial polypeptide expressing nucleotide sequence isolated from the Sargasso Sea
aatgccataaatgatgagaaaatcaatgatttttataaacgcataaaaaagtggctaaacaactctgaagttgattttgtagcagagccaaaaattgacggtttaggtgtttcgttaatatataaaaatggaatactagagagagctctaacaaggggcgatggatttaaaggagaagatatcacacataatgtcaaaactatcaatgctattccattacagctaagaaaatctgtaaaaaccccaacttttatggaagttagaggggaaatttttatgaacatctcagatttcaacaaattaaataaatctagagaagtattaaaagaaaaactatttgcaaatgctaggaatgcagcagctggaagtgtaagacaactcgatcctaaaattactgcctcaagaaatctctcaattttttgttacgaaattggaggtagtgaagatattgagtttaataatcaagttgaaatgcttgactatttaaagtcaattggactgcctgtaaatccactatccaaaaaaattacgtcagctagtgaaatgatagcatatcatcacaccctagaaataaatcgtaaccatatagattatgaaattgatggttctgtcataaaagtagataattataaaaagagagagcgattggggttaagatcacgttctccaagatgggctatcgcagcaaaatttaaagcaaagcaagcagaatctcagatcataggaattgatttgcaagtcggtagaacaggagttgttactccagtagcaaaaattaaagaagtcgaattgtcaggtgttatgatatccagtgctactcttcataatcaagatgaaattgatagaaaagatattagaattaatgattttgtattaatcgaaaggtctggcgatgtaattcctaagattacg

SEQ ID NO: 319745 - DNA, 827 bp, Unknown
  Bacterial polypeptide expressing nucleotide sequence isolated from the Sargasso Sea
aatgaaagaaaatgaaattaaaaaaatatataaaaaaaaaattaaccagttaattaaacacaatcaactttattttcaaaaaaataaaccaagtatacctgatgcagattatgacaaattaaaaagagaaatatttgaattagaaataaaatataaatatttaaatgacaaaaattctccaagattttctgtaggatttaccccatcaaaacactttaaaaaggaaaaacaccgaatcccaatgctatcactttcaaatgcgttcgacagggatgatttggaaaattttcaaaaaaaaatatttaattttttaaatataaaaaataatattgatcttgaatacagcgttgaacctaaaattgatggtatttctgcttcattgacctatttaaatgggaagttgacttatggtctatcaagaggagacggaaaagagggcgaactaattacagaaaatttaaaaacaatatcagatataccaaaagaagtagctgattctgactttcctgatgatattgatataagaggagaagtatttataaaaaataatgatttccaaaaaattgaagataaatttgcgaatccaaggaatgcagcttcaggttcactaagacaaaaaaatccagagaaggtaaaaaaaattccgctaaattttattgcttacacttatggttattttaaaaataataaatttaaaaaacagtcagaattaataaaatctcttaaaaaatggggatttaaaactagcgaatataactctgttataaagggagttgataatttaataaaaaatcatgaaaaatttgaaaaaaatagatttaaattag

SEQ ID NO: 319746 - DNA, 808 bp, Unknown
  Bacterial polypeptide expressing nucleotide sequence isolated from the Sargasso Sea
accaaggaagatttgataaattttgaaaaaaaaatttttaatttcttatcaaaagataaaaattacaaaattatttatagcgcagaaccaaaaatagatggtatttcagcatctttaacttataaaaatggagtcttcataaaaggtttgtctagaggtgatggaaaagaaggtgaggatataactgcaaatcttttaacgttaactgatataccaaaaaaaattaaatcaaaagattttcctgaagaaattgacattagaggtgaggtctttattcaaaatagtgattttgaaaaaataaaggaaaaatttgcaaacccaagaaatgctgcatctgggtctttaagacaaaaaaatccagaggatacaaaaaaaatacctctaaaatttattgcatacacatttggttttgaaaagggattaaaaacaaatagtcaatttgattatctaattgaactaaataaatggggctttaaaacaaatcctttaaacaaattaatttctggtattagtaatttaattgaaaattataattttgttgaaaaacaaagatccaatttagattttgatattgatggcatagtttacaaagtaaacgattttatacttcaaaaaagattaggtaatgttgcaaatgctccaagatgggcagttgctcataagttttcttcaaacaaagcaacatctcaaataatagatatagaaatacaaataggcagaactggagctttaacacctgttgcaaaaataaaaccaattaatattggaggtgtcttagtatctaatgcaacattgcacaatgaggacg

SEQ ID NO: 319747 - DNA, 863 bp, Unknown
  Bacterial polypeptide expressing nucleotide sequence isolated from the Sargasso Sea
tttaaaaaaattgcaaaacaatttgctaatccaagaaatgctgcaggaggttctttaaggcaaaaagattctaatgaaacaagtaaaatacctttaaaatttgttgcgtatgcattcgggacagttgagccaaaaaattttaaaaaacagtctgaatatttgaaattattaaagacatggggttttaatactaattcacataatagacttgtaagtacaattgaagacatagaaaaaaatcataaaacgatcgaagaacaaagattaaccattgattatgatttagatggtttggtttataaagtagatgatttggaattacaaaataggctgggttttgtgtcaaattctccaagatgggcaattgcacataaattttcttcagaaaaaggcttttcaataattaaaaatatcgagatccaagttggaagaacaggagcgctaactcctgttgctaaaatagaaccggttaatatcggaggagttgttgtttcaaatgctacgctacacaatgaagatgagattaatagaaaagatattagaataggtgataccgtatgtattcaaagagcaggagatgttattccacaagttttgtatgtagataaaacaaaaagagaaaaaaatacgaaaaaatttaattttcctgacaaatgtccctcatgcgggtcaaagacgataaaagaatttaattatagtaccaaaaaaaaggatgccgtaaccagatgtccagatctaaaattcgattgtaaagagattttaagagaaaagctaaaacattttgtatcaaaagatgcgtttaatattgatggttttggtaaaaagataattcaaaatttttgggatttaaatatgataaaata

SEQ ID NO: 319748 - DNA, 870 bp, Unknown
  Bacterial polypeptide expressing nucleotide sequence isolated from the Sargasso Sea
gagaaattgggcgagcttacacgtaggccgcgatgggctatagcctataagtatgctgcacaagaggcggaaacagttttgctggatgttgagtttcaagtgggtaggactggggcaataacacctgtggcaaaactaaagcccgtatttgttggtggtgtcacggtctccaacgcaacactccacaatatggatgaagtagagcgtttaggtttatataggggtgctgaagtggttctgaggcgcgccggggatgttattcctcagattttgaaagtctccaatcccaaatcggaaagtagacgaaaggtcatcgaaagaccgagtgtctgtccctcttgtgggacgcccataaaattatcaacggataatgttgtgatgcgttgcgaggctgccgcaaatgaatgtccggcgaaattaaaggaaatgttgaaacatttttcgtcgcgcctggcttttaacttggagggtttgggagaaaaaataattgaacttctgattgcgtgcggattggtgtcggagccagcggatttcttcaagctgactaagagtgcgttggaggctctgcctggttttggagagaaatcggcccagaatcttcttaaggaaatcgaaaaaaaaagaacggttgatcttcacaaatttatctatgcccttggaattcgggaagttggtgaagcgacatccaagttactcgcgaaaagcttttgtgatcttgagaatttaataaaagctaatcttgaagaattgaatgctgtagatgatgtaggtcctattgtcgccgatcaaatacatacttatttcgctaattcgagcaatattttgatgttacgcaacctgctctcttctggagtgatagttctcagtctc

SEQ ID NO: 319749 - DNA, 883 bp, Unknown
  Bacterial polypeptide expressing nucleotide sequence isolated from the Sargasso Sea
attgaaaaacataattactactactacacattaaattcacctcgtatctccgatggggagtttgataagttattcaaagaactgcaatctttggaacaaaaaaatcctgaaatcataacgtcagactctccaacgcaaaaaattggttctaaaccattaaaagaattcaaatcaatcaaacatagtattccaatgctttcattagataatgcgatggggaaaaatgacattatagcttttgatgaaagaataaaaaaatggttaaatacaaaggataatattgagtatgtcgctgaaccaaaactagatggaattggtatagaggtcacatacaaaaatggcatactagtaagtggttcaacccgtggtgatggaattattggcgaagatataacagaaaacataaagacaattcgcaatctacctttaaaaatttacgggaataacttccccaaactattagaggtaagaggagaagtctttattaaaacagatgattttaagacattaaataaaactagattaggtcaagacgaatcaatttttgcaaatcccagaaatgctgcagctggcagtttgagacaacttgactcaaaaattactcacagcagacctctttcaatttttttatatgattcaggaaaggtagatggatatgattttcaaacccataaagaattcataaataaacttattgatttcgggctcccagttaaccccttaattaaaaagatctcaggtgtcgataatcttattgactatcattctaaaatggaattggatagaaacaaactaccgtatgaaattgatgggacagttttcaaggttaataaaattaaacttagagaagtttgggagcgcggagtcgatctccgaggtggcc

SEQ ID NO: 319750 - DNA, 799 bp, Unknown
  Bacterial polypeptide expressing nucleotide sequence isolated from the Sargasso Sea
cagaaatgcagcttctggaagcttaagacaaaaggatccaaaagcaactagtaaaatacctttaaaatttattgcctatacatatggatttgcaaaaaatctgagcattaaaactcaatcaagttttttaaaaaatcttaaaaattggggttttaaaacaaatgaatataataaaactatttgcgggattaataacttaattgttaatcataatcacttagaaaaaaaaagagatgagatagattttgatatagacggcattgtttacaagataaatgatattgaactacaaaaaagacttggatacgtaacaaatgctcccaggtgggctattgctcataaattttctgcgaatagttcaatttcagaaattttaaatatagaaattcaggttggcagaacaggcgctttgactccagtagcaaaaataaagcccgttaaaataggtggtgttacggtatctaatgcaacgcttcataatgaggacgaaattacaagaaaagatataagagttggcgataccgcaactattgaaagagcaggagatgtaataccccatgtaatatctgttgatttaaataaaagaaaaaaaaactcacaaaaatttatttttccaaaaaaatgcccatcatgtggatcgtcaactgtaaaagaatttaacgagagtacgaaaagaaatgatgcggtaagacgttgttccagtgaaggatttgaatgtgatcagatttcaatagaaaaaataaaacattttgtgtcaaaagaagcattaaatattgaaggttttggaaaaaaattgtag

SEQ ID NO: 319751 - DNA, 886 bp, Unknown
  Bacterial polypeptide expressing nucleotide sequence isolated from the Sargasso Sea
aaagaatataaaaaaaaaattaaattattaatttattataataaaagatattataatgataattactctaaaattactgattcggaatatgatgaacttaaaaaagatattataaatttagaaaaaaaatataaatacttaaaatcaaaagactcgcctacactagaaattggttataaaccttcaaaaaattttaaaaaaatattacatagaactcctatgctgtctctagcgaatgcttttagcgagggagatcttttaaattttgaaaaaaaaatactcaattttctttctcgaaataataattcaaatatatcttatactgctgaaccaaaaatagatggtatttcagcatctttatcttataaaaatggaaaattaataagtggattatctagaggtgatggtaaagagggggaggacataacttcaaatcttgctacaataaaagatatacctaaaattattttatctaaagattttcctgaagagattgatatcagaggagaagtttttatacaaaatactgattttgataatttaaaagataagtttgcaaacccaagaaatgcagcctcaggttctttaagacaaaaagatccaaaagatacccaaaagatacctttaaaatttattgcttataactttggttttgaaaaaggtttaaagataaataatcaatttgaataccttaaaaaattaagtgaatggggatttaaaactaatccattgaataaattaattactggagtaaaaaatttaattaagaattataatcatgtagagaaacaaagagcagatttaaattttgatatagacggtattgtttataaaataaatgatttttctctacaaaaaagattaggttatgttgccaatcaccaag

SEQ ID NO: 319752 - DNA, 862 bp, Unknown
  Bacterial polypeptide expressing nucleotide sequence isolated from the Sargasso Sea
aataaaatcaaattatttaaaaaattaaacaaattctattatgagaaaagtcaaccaatggttgatgatcgtgattatgatcaattaaaaaaagatatattagaacttgaaaataaatacgaatatttaaattctgatttttcaccttcaaaaacgataggttataagccctcaaaaaatttcacaaaaatttttcacagagttccaatgttatctctgtcaaatgcttttactaaagatgacttgataaattttgaaaaaaaaatacttaattttctgtcaaaaaaaaataattttaaattaaattatagtgcagaacctaaaattgacggaatatcggcttcattaacttacaaagatggaaaattagaaaaagggctgtctaggggtgatggaaaggaaggagaggatattacagaaaatcttaaaacaataaatgatattccaaaaaaaattttgtcaaaagattttccagagtatattgatattaggggagaggtatttattaaaaatagtaaatttaataaattaaaagataaatttgccaaccctagaaatgctgcatcaggatcattaagacaaaaaaaccctaaggatactgaaaaaattccgttaaattttattgcttatacatttggttttgaaaaaggtttaaaagtggaaaatcaatttgattttttaaaaaaattagatgattggggttttaaaacaaatcctttgaataaattaatatcaggaatagataatttatttttaaattatcatgatattgaaaaacaaagatctaacttagattttgatatagatggaatagtttataaaataaatgaatttaaacttcaaaaaagattaggtaatgtgc

SEQ ID NO: 319753 - DNA, 697 bp, Unknown
  Bacterial polypeptide expressing nucleotide sequence isolated from the Sargasso Sea
aaagttgttggacacaaaccttctaaaaatttcaaaaagtcaattcataaagtacctatgctctctttaggaaatgctttttctgaggaagatttgaataattttgaaaaaaaaataaaaaattttttatctataaaagaaaattttaaaatttattatagtgcagaaccgaaaattgatgggatatctgcatctttgacatatataggtggtaaattttgtaaagggctttctagaggagatggaaaagagggagaagaaataacagaaaatctagcaactataagtgatattccaaaagtgatttcatcaaaagatttccccaaagaaatagatattagaggagaggtctttattcaaaatagtgattttaaaagtataagtgaaaaatttgctaaccccagaaatgcagcttcgggatcattaagacaaaagaatccaaatgaaacaaaaaaaatacccttaaaatttattgcatacacttttggatacgaaaagggtttaatagtagaaaatcaatcaaattttattaaaaaattaagtgaatggggatttaaaacaaatccattaaacaaattaatctcaggagttaaaaatttagttaaaaattataatgaaattgaaaaaaaaagaacgaacttagattttgatatagacggaatagtctacaaagtgaatgattttgcaatgcaaagaa

SEQ ID NO: 319754 - DNA, 847 bp, Unknown
  Bacterial polypeptide expressing nucleotide sequence isolated from the Sargasso Sea
tatgaaagatattgaaataaaaattagaacactaatagatgaaataaactttcataactatcaatatcatggaatggatgatccaaaaatatcagaccatgattttgatcaaatggtcagagctcttcatgatctagagaagaattatcctcaactcattcaagctgattctccgacacaaagagttggatcaaaacccatcgatcgttttattcaaattgaccatataacaccaatgctttcattggataatgttttctcaatcgatgaattaatgtcttttgaaaaaagaatcaaagataagctctcgttaaatgaaaatattgagtttattgctgaaccaaaattcgacggtgttgcagtcaatttagtatatgaatcaggaaaattatcttatgcaacaacaaggggtgatgggaaaacaggagaggatgtgacacacaacatcctaacgatcaaatcgatacccataacactcaacgcatcttttccccctgagaagatcgaaatacgaggtgaagtcattatttctaaaaatgattttgagaagatgaatcaagagaatgaagctaagaatctaaaggtttttgcaaatcctagaaatgcagcagcaggaagcataagacaactagatccaaatattgcaaagtgtagacctttgcgattttatgcacatggatatgggtttctttctaatgaaaatgatttcaacaaccatactgatgtcatcaaatatctaaatgattcaggaattgtaatctcaccactatcacagatagtaataggcgctgaagaatgtgataaatattatcagaaaatcgattctactagggattcgcttgatttc

SEQ ID NO: 319755 - DNA, 673 bp, Unknown
  Bacterial polypeptide expressing nucleotide sequence isolated from the Sargasso Sea
gatgagagaaagtgaaataaaaaaaaaatatcttgaaaaaataaaagaacttgaaaagcataataaattttactttgaagaaagtgcaccaaaaatatctgatagtgaatatgatcaaattaaaaaagaaattattaatttagaaaaaaaatattcatacttaaaaagcacatcttctccatccaattcattaggatatactccttcaaaaaattttattaagtcaaagcacagagtaaagatgttatctctatctaatgcttttgatatagaagatctagaaaattttgaaaaaaaaatatttaattacttaaataagaaaatagaggtgaagtatagtgttgaaccaaaaattgatgggatttcggcatcattaacttacaaaaacggtttattagtttcaggaacatcaagaggtgatggaactacaggagaagtgattactgaaaacttaaaaaccatttccgatatacctcagagaataactaataaagattttccaaaagatatagacattagaggtgaagttttcatagaaaagaatgattttattaagttaaaaaatgattttgcaaatcctagaaatgcagcatctggttcactcagacaaaaaaatccatcagaaactaaaaaaattccacttaaattcgtagcttatacttatggttacttc

SEQ ID NO: 319756 - DNA, 589 bp, Unknown
  Bacterial polypeptide expressing nucleotide sequence isolated from the Sargasso Sea
gggattccgctaaaacttgaaaatttttctactaaagatcccaaagactttgatgttagaggagaaatctatatggaactctcctcttttaatgaattaaataagcagcttgcagaaaaaaaattcgcaaatcctagaaacgctgcagcaggaagcttaagacaattagattcaaaaatagttgctagaagacctctaaaaatgattgcccatggcataggttttatatcagatgaatcttactttgagtctcattcatctatgattcaacaatttaaaaagtggggcttgcctacaaatgatctagttaaagaatttgcctcgataaatgattgcgaatcttatttcaatgagattgcgttgctaagagatagtttggattatgaaattgatggcatggtcatcaaaattgatgacttaaaaattcaggaagaaataggtctaaatgcaaggtcaccaaaatgggcgatagcaagaaagtttaaggctttagaagttattaccaaggtcaaaaaaataattttcaatatgggaaggacaggaaaattaactcctgttgctcaattagatccagttcaagttggaggcg

SEQ ID NO: 319757 - DNA, 892 bp, Unknown
  Bacterial polypeptide expressing nucleotide sequence isolated from the Sargasso Sea
gacagcaattatgataaattaaagagagaaataattgatctagaaaaaaaatatatttttttaaattctgatatttcgccttctaatacagtgggattcacgccttcaaaaaattttttaaaagcaactcatagagaaagaatgctctcactttccaacgctttcgataaaaatgatttagaaaattttgaaaaaaaactactaaattatttaaatattaaagataaaaaaattttagaatatagtgttgaacctaaaatagatggaatttctgcatcattaacttataaaaataatcatttggttttaggattatcgcggggagatggaacagaaggtgaagtaattactgaaaatttaaaaacaatcaaggatattccaaaatcaattaaagatagaagattccccaaggacatagatataagaggagaggtatacataagtaaaaatgactttgagaagataaaaaatcgatttgcaaatcctagaaatgcagcatccggcactcttaggcagaaagatccaaatgaaacaaaaaaaattccactaagatttatagcctatgcatacggatttaataataaaataaattttaataaacaatctgaatttttaaatcttcttaaaaactggggttttaaaacaaatatgtataataaaatcatcagtggcatagatgatttggtacaaaatcataaggagttagaaaaaaaaagacatagtttagattttgatttagatgggctagtatataaaataaacgacttggatttgcaaaaaagattaggttttgttgcaaatgctcctagatgggcaatagcgcataaattttcagctgatagctcattttcaaaaatattaaatatagaaattcaaataggaagaacaggag

SEQ ID NO: 319758 - DNA, 638 bp, Unknown
  Bacterial polypeptide expressing nucleotide sequence isolated from the Sargasso Sea
aatattgcaagagatatgggatttaatgtaccgaaatatgaaaaggttgtgaatggattggatggcgttaaagagtacatagattattgggataaaaacaggtcaagcttaccatttgaaattgatggaattgttattaaaataaataatatagattatcagaaaaaattaggttttacatctaagtttcctaggtgggctattgcttacaagtataaggctgaaaatttggcaacaaaattaaattcaatttcatttaatgttggaagaacaggtgcaataaccccagttgcaaatttagagccggttttaatttctggatcaactgtaaaaagagcttctttacatagttttgatcaaatgatgaagcttcgccttagagctaatgatagtgtttatgttgaaaaaggaggtgaaattattcctaaaattacaggaatagatattgaaaatagaggttcagaatatgatgagattaaattcccaacaaattgtcctgagtgtaattctgaactagtaaaacttgattctgaatccaacttcttctgtccaaatgttaaagagtgcacaccacaagctataggaagaattcaacactttgtttcaagaaaagcaatgaatattgatggtttaggcga

SEQ ID NO: 319759 - DNA, 887 bp, Unknown
  Bacterial polypeptide expressing nucleotide sequence isolated from the Sargasso Sea
tttgaaaaattgtaaatctgatcttattgaaataagaggtgaggtatttttctttagaaaagattttgagaaattaaacaaactattagaaaaaaaaaatcaattttcaaatcctagaaacgctgcatcaggatctcttcgacaaatcaatagtaaaattactaaagatcggcctttaagatttataccacatggatatggaaaattttcttctgaaaaagagtttacaaactttgaagaatttttatctttttgtaaaaaaaataattttgatcaaactggttatgctaaaaaatatactagtttaaaaaatattcatagttatgtttctgaaattgaaaaaaaaagatcttcaataaaatttgatattgatgggatggtaataaaaattaatgatttagatttacaaaacatgttaggaagcacaaataaatttcctagatgggcaatagcagccaaatttagttctgaagaagcattgacacaagttgaaaaaattgaactgcaaattgggagaactggggctattacgcctgttgccagactaaagccaataaatataggaggtgtaattgtatcaaacgcaactcttcataattttgatgaaattacaagaaaagatataagaattaacgattttgtttgggtaaaaagagctggggacgtaattccctatgtttcaaaagtagatattgagagaagaaaaaaatcaagtgatgaatatgtgataccaaaaaaatgtttatgtggatctaaaataataaaaattaaaggtgaagcagtacaaagatgtagtgccagaaaaaatcagtgtaaatatcaaaacttagagtccttcaaacactttgtttctaaaaaggctatgaatatagatggtcttggtgcaa

SEQ ID NO: 319760 - DNA, 691 bp, Unknown
  Bacterial polypeptide expressing nucleotide sequence isolated from the Sargasso Sea
aatgaatgtttctttaaaagaatataaaaaaaaaattaatttattaaagaaatataacaaatattattatcaaaaacaaaaacctttagttccagatagagaatttgatattttaaaacaagaaattttagagttagaaaaaaaatttaattttaataatagtaattctccaagcaaaaaagttggatttgaaccatccaaaaaatttaaaaaattcaaacacaaagttaaaatgctttcattatcaaacgcatttaataaagaagacctaaacaattttcagaaaaaaaatataaattatttagctttagataagaattttcaatttgaatacagtgttgaacctaagattgatggtatttctgcttctttaaaatataaaaatggagaatttgtgttgggtttatctagaggagatggagaagaaggcgaagatataactgcaaacttaaaaacaattaaagatataccacttagcatagataaaaatgattttccagatgaaatagatatcagaggtgaggtttttatagaaaacagagatttcaaaaaaattgaaaaaaattttgcaaatccaagaaatgctgcatctggatcattaagacaaaaggatccacaaaaaacaaaattaattccgttaaaatttattgcatatacttttggttttacatcaacaatcaaggcaaaaaaa

SEQ ID NO: 319761 - DNA, 862 bp, Unknown
  Bacterial polypeptide expressing nucleotide sequence isolated from the Sargasso Sea
gccaaggtttctagatgtaatatggagccctagcaaagatggctatttaaaacctagagttcgcattgaacctattgaattaggcggagttaatgtagaatacgctacgggatttaacggttcttttatagaagaaaacaaaataggagtcggtgctattattaaaattatacgcagtggagacgtaattcctcatattatggatgttgttatacccgctgtcaatgcaaaaatgccagaagaagattatatttggaataaaacccgcgttgacgttatgttaaaagacgccgatacaaatcccgtagttatggagaagaaaattactttgtttttcaagaatcttgagattgctggtgtagggagcggaaatgtcaagagattaatccaggcaaaatatgatactatacccaagattttggcgatggaagagaaagaatatttaaatgtagaaggattcaaggctaaattggcgaataaagtgtatacgaatattaaaacacaaatagaaaaagcctctctggtttccttgatgaaagcgtctaatatttttggacgtgggttgggtgaaagaaaaatccagcctattttggataaacatcctgatattttaacatcggatgatactcgcgaagaaaaagtagaaaaagtaaaggcggtcaaaggaatcgcggaaaaatcggcgatagcatttgtagatcaaattgtacctttcgttaaatttatggaagaagcaaaactagatagtaaattacaagtagaagaaaaagaagtccctgtatatgacgaagaacatccattgttcggtaaaaagattgttctaacagagattaaaggaaaagagctagagagatttattaaa

SEQ ID NO: 319762 - DNA, 811 bp, Unknown
  Bacterial polypeptide expressing nucleotide sequence isolated from the Sargasso Sea
gttactcaggatatagaatataaaacacatgatgattttcttaaaaatattgccagttttgggctccctgtaaatcccctgatagaaaaaataatcggcataaaaaacatggtcagataccataataatctagaaaaaaacagagaacaattagaatatgagatagatgggacggttttcaaaataaacaattacaacgaacgaatgaaagtaggttcaagaagccgttcaccaagatgggcaattgctgggaaatttaaagcgcaacaggcaactagtattataacagatattattatccaggttggaagaacgggagcgcttacacctgtagcaagagttaagccagtttttgtttctggtgttacagtgtctaatgttacgttacataaccaagatgaaattgacagaaaagatattaggctaggtgataaagtgctaattgaaaggtcgggagatgtaataccaaaaattgttaaggtaataaaaagaaaaaatcaaaatagtataaaatttaaaatagataatctttgtccatcatgcgggcaaaaaactgtgaaacaaaacgatgaagcaatcatacgatgtaataatttttactgcccttcccagatgcttgggagaatacagcattattgctcaaagcttgcaatgaacattgagggactaggagtgaaaattgttgagcaattaattgaaaataagctggtgaaaaatattgatgatctctattcgattaaaaagaataaaatttcaaaaatcaatggacttggtgagaggtcagcaaagaatatcattgattccataaata

SEQ ID NO: 319763 - DNA, 807 bp, Unknown
  Bacterial polypeptide expressing nucleotide sequence isolated from the Sargasso Sea
aaaaaaaattatttaaaaaaaattaaagaaattacaaaattcaatgagagttattataataaaaataaccctttggtttctgatggtgaatatgatcttttaaaaaaaaaaattatttctttagagcaagaatatgattttttagaccataaagattcaccttcaaaaaatgttggatttaaaccttcaaaaaacttcaaaaaaattgaccataaagtgccgatgttatctcttgcaaatgctttctcagaagaagatttaataaactttgaaaaaaaaattattaactacttaaatgaaaaaaaaaatttcactattgaatacagtgcagaaccaaagattgatgggatatcagcatctttaatttataaaaataaaaagtttgtaacaggattgtcaagaggtgatggtcaaacaggggaggatataactgctaatttgaaaactatcagtgatatacctcaaaatatttctgcaaaagactttcctgaagaaattgatattagaggagaagtatttatacaaaatagtgattttaaaaaattagcagataagtttgccaacccaagaaatgctgcttcagggtcattaagacaaaaaaatcctaatgacactaaaaaaattccattaaaatttattgcatatacttttggatttgcaaaagggatgaaagtaaataatcaaaaagattttttaaaaaaattaagtgattggggatttaaaactaatcatttaaacaaaattatcgatgggactaaaaatttaatgcaaaattataatcaaatagaaaaaaaaagagttgattta

SEQ ID NO: 319764 - DNA, 711 bp, Unknown
  Bacterial polypeptide expressing nucleotide sequence isolated from the Sargasso Sea
gatggataaaaataaaattaaaaaagaatatgataaaaaaatccaaaatttagtaaaactaaataaacattattacgattttagcaaacctttagttactgatcaggagtacgatcaaattaaagcagaaatattatctcttgaaaagaaatttaattttttagataataaaagttcaccatctaaagttgtaggctttaaaccatctaaaaattttaaaaaagttttacacagagttcccatgctttcactttctaatgcttttgatgaggaggatttagtgaattttgaaaaaaaaataaataattttttagaccaaaaaagctcaaacgaattagagtatagcgcagaacctaagatagatggaatttctgcttcattaatttataaaaaaggaaaatttataactggactttccaggggcgatggaaaagaaggggaagatattacacaaaatttgatgacaatagatgatatccctaaaaatattttagcaaaaaattttcctgatgaaatagatattcggggcgaagtatttattcaaaataatgattttgaaaatcttaaagacaaatttgctaatccaagaaatgctgcatctggatcattaaggcaaaaaaatcccaatgatacaaaaaaaattcctttaaagtttattgcttatacatttggatatgtaaataacatggagatagaagatcaaagcagtta

SEQ ID NO: 319765 - DNA, 783 bp, Unknown
  Bacterial polypeptide expressing nucleotide sequence isolated from the Sargasso Sea
actaagagataccattaacagacatgaccatttgtattacgtcaaaaattctccaactatttcagacagagaatatgattccctctattgccgtctaaaagaattggaaaataaatatcctgagtttgtgtcttctagttccccgacccagcgagtgggtggaaaagcagagcaacggttccagcaagtggtacatcccacacccatgctcagtctcgataatacctataacatcgatgaaatgcgtgccttccatgagcgtgtaataaaatgtcttccaggtgtagcagaagactccatcgaatatgttgttgagctaaagtttgatggattagctatagccttgacctatgaagatggaaaattattacgtggcgcgacgcgcggtgatggtgtgcagggagaagatattactgccaatttaaaaacaattagatctattcctctcaaaatctctgttgagccctttaagaaaattgaagtgcgaggggaggtttatatgccgaaaaaagagttccaaaggttaaatgctattcgtaaaaaagctggcgaaacaccctttgccaaccccagaaacgcagcggcaggtgcacttagagttttggatccagctataacggattctagaaaactgggaatttttatctatacggtaggttttctcgataaggatatttataaaacccattttgaattacagcgacaactcgcagctttaaggtttccagtgaatgagcacaatcggttatgtgcaaattttgaagaaacgatagcggttattga

SEQ ID NO: 319766 - DNA, 847 bp, Unknown
  Bacterial polypeptide expressing nucleotide sequence isolated from the Sargasso Sea
attaatgagcttaaaaaacacaataaactttatttcgaagatagttctccacttatatccgataaggattatgataaaatcaaaaaagatatattaaacttagaaaaaaaattttcatatttaaaagatgcctcttccccgtctatctctttaggttttaccccttctaaaaattttataaaatctaaacacagagttaaaatgctgtctttgtcaaatgcttttgatattgaggacttagaaaattttgagaggaaaatatttaattacttaaataaaaaaattaaactcgagtacagtgtagaaccaaaaatagatggaatttcagcttcattaacttacaagaatggttcgttgattatgggcacatctaggggtgatggaacaacaggcgaggtcataaccgaaaatttaaaaactattaaagatataccccagaaaataacttctaaggattttccgaaagatatagatataaggggtgaagtttttattaaaagaagtgaatttgacaaattaaaaaatgattttgcaaatcctagaaatgcagcttcaggatccttaagacaaaaaaatccaaatgagactaaaaaaatcccacttaattttgttgcttatacttacggttattttgaaagtgacaaaatacgaaaacaatcagattttttaaacttcttacaaagatggggttttaagacaaatgaacacaataaaattcttagcagtatagatgatttaagaaattttcataaaaaatttgaaaaagaaagatttaatttagaatacgatgttgatggtttagtttataaaataaatagtctcgaacttcaaaaaagattaggattta

SEQ ID NO: 319767 - DNA, 898 bp, Unknown
  Bacterial polypeptide expressing nucleotide sequence isolated from the Sargasso Sea
tccgtaggagaagtaattactgaaaatttaaaaactattaaagatatacctcagaaaataactaataaagatttcccaaaagatatagatattagaggtgaggtttttatagaaaaggatgattttaataaattaaagaatgattttgctaatcctagaaatgctgcatctggttcactaagacaaaaaaatccattagaaactaaaaaaattccacttaactttatagcttatacttatggttactttgaaagtgataaaataaaaaaacagtctgattttttaagttttttgaaaaaatggggctttaaaacaaatgagcataataaagttttaaaaaatattactgatttagaaaagtttcacaaaaaatttgaaaatgataggtttaatttaaagtatgatgttgatggtttagtatataaaatcaatagtcttgaccttcaaaacagactagggtttacagcaaattctccaagatgggcggttgctcataaattttcggcagatagtgggtattctcaaataacagacataaatattcaggtaggtagaactggagcattaactccagtagcaagaataaaaccagtaaacattggaggtgtagtagtttcaaatgcaacacttcataatgaagacgaaattattcgaaaagatataagagtcggcgatactataaaaattgagagagctggagatgtaattccacatgttatacttgttgatttagaaaaaagagataaaaaatcaaaaaaatttatctttcctgatgaatgtccatcttgcggttctgaaactattaaagaatttaacaacacaacaaaaaaatatgatgctgtcagaagatgctcaaatgagggttttgattgtgaaaaaattgctattaaaaaataaa

SEQ ID NO: 319768 - DNA, 817 bp, Unknown
  Bacterial polypeptide expressing nucleotide sequence isolated from the Sargasso Sea
tcgcttacttataaaaatggaaaatttgtaaaaggattatcaagaggggatggaaaagaaggtgaagacataacttcgaatttagagacaattaaagatattcccaaaaaaatatttaataaaaattttccagaagaaattgacatacgaggagaagtttttattaaaaatagtgactttgaaaatcttaaggataaatttgcaaatcccaggaatgcagcatctggttcacttagacaaaaagatcctaatgatactagtaaaattcccctaaaatttattgcttatacttttggatatgaaaaaaatttaaatatagacaatcaatttgattttttaaaaaatttagacgaatgggggtttcaaaccaatcccctaaataaattaatctctggagtaaaaaatttactgttaaattacaaagaaattgaaaaaaaaaggtctgaaatcgattttgatatagatgggattgtatataaaattaatgattttaagcttcaaaaaagattaggcaacgtagctaatgctccaagatgggctgttgctcataaattttcatcaaataaagcagtgtcaaaaattataagtatagatatccaaattggaagaacaggagcattaacaccagttgcaaaaattaaaccaattaatataggtggagttcaagtttctaatgcatcactacataatgaagatgagattaagagaaaggatgttaggataggtgatgcagtggtcgttgaaagagctggagatgttataccgaacattttatctgtagatattaataagagaccaaaaaaaaatataaaatttg

SEQ ID NO: 319769 - DNA, 682 bp, Unknown
  Bacterial polypeptide expressing nucleotide sequence isolated from the Sargasso Sea
cgggagtttgagacaactagatcctcgaataacttcatctaggcctcttagaattttttgttatgcaccaggtataattaatggtatgtcttttaaaaatcaaaaagattttttggattttttgcctaaatatggatttccagttaatccacatacagcaattgggaatggtattgattttttacataaatactatactaaatgtgaaaatttaagagaaactttggattatgatattgatggtgcagtttttaaagtaaactcatatgattatcaaaatcaaattggtgagagaagtcgatctcctagatgggctattgctggaaagttcaaagcacagcaagaaactacaaaaattaaaaatattattataagtgtaggtagaacaggagctttaactcctgttgcaaagctagagcctgtgaatgtaggtggtgtagtagtatcaaatgcaacattgcacaatcaagatgaaatagacaagaaagatataagaataggtgatacagttttaattcaaagagctggagatgttatccctgaaatagtaaaggttataaaggaatatagaaaagatacatcagttaaatatataattaattcaatttgtcctgaatgtaatagtcctgcaaaaaaaaataaatctgaatctgtattacgatgtaataataatatctgtcct

SEQ ID NO: 319770 - DNA, 850 bp, Unknown
  Bacterial polypeptide expressing nucleotide sequence isolated from the Sargasso Sea
gaaaaaaattattcatatttaaaaagtaaatattcaccatctaattcattaggatttactccttctaaaaattttataaagtcaagtcatagaattaaaatgctctctttatcaaatgcttttgacctgagagatttagaaaactttgaaaaaaaaatatacaattatttaaatgaaaaaattgatgttgaatatagtgttgagccaaaaatagatggtatatctgcctccttaacatataaaaatggtatattggtcttaggtacatctaggggggacggcaatacaggggaagtaataactgaaaatttaaaaactatttctgatatacctcaaaaaataattagtaaagattttccaaaagatattgatattagaggtgaggtatttataaaaaaaagtgattttagtaatttaaaaaataattttgccaatccaagaaacgcagcatcaggcacacttagacaaaaagatcccgatcaaacaaaaaaaattccactaaatttcgtagcttatacttatggatattttgaaaataaaacaataaagaaacaatcagaatttttaagatcattaaaaaaatggggatttaaaacaagtgagcacaataaagttttaaaaaatattaatgatttagaaaattttcacaaaaattttgaaaaagatagatttgatttagaatatgatgttgacggcctagtttataaaattaacagtctagatcttcaaaaaagattaggttttactgctagttctccaagatgggctatagctcataaattttcagctgatagtgcatattctcaaattgaggatataaatatccaggtggaagaacaggtgcattaac

SEQ ID NO: 319771 - DNA, 772 bp, Unknown
  Bacterial polypeptide expressing nucleotide sequence isolated from the Sargasso Sea
attgatgggattgtttataaagtaaaccaaataaatcttcaaaaaagattaggcagtacagctaatgcaccaaggtgggcgattgcttacaaattttcatcagaaaaagctgttacaaaaattaaaaatataattattcaggtaggcagaacaggcgctataactcctgttgcaaaagtggaaccagttaatgtaggtggagttttagtctctaatgcaacactacacaatgaagaagaaataaaaagaaaagatataagagtaggtgatacagttcttcttcaaagagctggagatgtaataccacaagtaatttctgttcaaaaaaatttgagaaataaaaacagtaaagaatttcaatttcctaaaaaatgcttatgcggagctaacacaataaaggaaatcagcaaaacaacgaaaaaagaagatgctgtaagaagatgcaacagaggatatgcttgccaatttactgttaaagaaaagctaaaacatatggtttcaaaagatgcttttaatattgacgggcttggaaaaaaggtaattgataactttttcgaaattgatttaattaaagaaccagcagatatatttaaattaaattttgataaaatcttaaacttagaaggctggggaaagctttcagtagaaaatcttaaaaaagcaattttgaaagctaaaaaaattagtttaaacagatttatttactctattggcataaggcatataggacaagaaaatgcaaaaacactcgctggttttttggagaaataaa

SEQ ID NO: 319772 - DNA, 952 bp, Unknown
  Bacterial polypeptide expressing nucleotide sequence isolated from the Sargasso Sea
tccctcgccaatgcatttacagaggaagatttaataaattttgaaaagaaaattattaattttctgtcaaaaaaaaatgatttcaaaatattttacagtgctgaaccaaaaattgatggaatttcagcttcactaacttataaaaatggtgagcttttcagaggtctctctagaggagatggtaaagttggtgaagatataactgataatttgaatactattatagatattccaaaaaaaatattatcaaaagattttccagaagaggttgacataaggggcgaggtttttattcaaaatagtgattttgaatatttgaaagataaatttgcaaatccaagaaacgctgcatcaggctcattaaggcaaaaaaatcctgaagatactaaaaaaattccactaaagtttattgcttatacttttggttttgaaaatggcttaaaagttgaaaatcaatcagattatctaaaaaaattgaaagaatggggctttaaaattaatccgttaaataaattgataagtgggattgataacttaatagaaaactataatgagattgaaaaaataagagctgatttagactttgatattgatggaattgtttacaaagttaacgattttactcttcaaaaaagattgggaaatgttgccaatggtcctagatgggctgttgcacataaattttcctcaaacaaggcaatatctctaattgaagatatcgaaattcaaattggaagaactggcgctttaacaccagtggcaaaaattaaaccaatcaatataggtggagtacaggtatcaaatgcaactttgcacaatgaagatgaaattattagaaaagatattaggattggtgacacggttacagtagagagagctggagacgtaatacctcatgttgtttcagttgatgtattaaagagaaaaaatacatcaaagaaattatttccaa

SEQ ID NO: 319773 - DNA, 638 bp, Unknown
  Bacterial polypeptide expressing nucleotide sequence isolated from the Sargasso Sea
gatggataaaaataagattaaaaaaagttataatgataaaattcaaaatttagtaaaactaaataaacattattacgatctaagcaaacctttggtaaatgatgatgagtatgatcaacttaaagcagatatattatctttggaaaaaaaatacgactttttagatagtaataattcaccctcgaaaatagtgggttttaaaccatctaaaacttttaaaaaagttttacatagagttcctatgctttcactctcaaatgcatttgatgaggaagatctggtaaattttgaaaaaaaaattaataattttctagaccaaaagaattcaaacgaattagagtatagtgcagaacctaagatcgatggtatttctgcttcattgatttataaaaaaggaaagtttgtgattgggctttctagaggagatggaaaagaaggagaagatatcactcagaatttaatgacaattaacgatattccaaaaaatatttcaattaaaaatttccctgaggaaatagagattcggggtgaagtatttattcaaaataaagattttgaaaaaagtcttaagcacaaattcgctaatccaagaaatgctgcatctggatcattaagacaaaaaaatcctaaagatacta

SEQ ID NO: 319774 - DNA, 936 bp, Unknown
  Bacterial polypeptide expressing nucleotide sequence isolated from the Sargasso Sea
taatcatacagaacttgagaatcttagatcaactatagattatgatgtagatggaatagtttataaaattaataatataggttttcaacataggctgggctcaacatctaattctccaagatgggcaatagcttataaattttcctctgtaaaagcctcatctagaataaaagaaatttcaattcaagtaggcagaacaggcgctataacaccggtagcgaaaatagatcccattacggttggtggagtagtagtttcaaatgcaactctgcataacgaggatgaaattaataggaaagacattagagttggtgacgttgtaacaattcaaagagcaggagatgtaataccgcaggttttgtcagtcgataaatccaaaagaaataacaaaagtaaaaaatttattttcccagaaaaatgtctttgtggttatcctacaaaaaaagagattaatttaacaaccaaaaaagtagatgcagttagacggtgtattagaggatacgaatgtgattttactgcaagagaaaaattgaaacatttagtctctaaagatgcatttgatattgatggattaggaaaaaaagtaatagataacttttgggatttaaaacttataagaacaccttctgatattttttctttaaattacgaaaaaatagaaaaacttgagggatggggaaaactttcaattaaaaatttaaagaatgctattagcaaatcaaaaaaaataattttggatagatttattttttcaattggaataagacatatagggcaagagaatgctaaaattttatcgggttttttcaaaaatagtaaaaaattctcagaattatttcactctcaaaaaagaaaagatattttggataatttgtatgatcttgatgggataggtgaaacacaagtaaaatcaatcgaagattttttttcaaggaa

SEQ ID NO: 319775 - DNA, 782 bp, Unknown
  Bacterial polypeptide expressing nucleotide sequence isolated from the Sargasso Sea
tcgtgaattaagaaaacacaatgagctttattttgttcaaagctcccccaaaatatcagataaggaatatgatgaaattaaaagagaaataataaatttagaaaaaaaacattcttatctaacaagtaacatctcaccatctaattcattaggatttgccccatctaaaaatttcattaaatatagccacagagtcaaaatgctttctttatcaaatgcttttgatttagaagacttagaaaattttgaaaaaagaatttttaattatttaaataaaaaaatcgatgttgaatacagcgttgagccaaaaatagatggtatatctgcttctctaacatacaaagatgggttgttagttttaggagcatcccgaggagatggtatgataggtgaggtaattactgaaaatttaaaaactatttctgatatacctcaaaaaataacttataaagactttcctaaagatattgatattagaggtgaggtatttattaaaaaaagtgattttagtaatttaaaaaataattttgccaatccaagaaatgcagcttcaggctcattaagacaaaaaaattctgaacaaactaaaaaaattccacttaattttatagcctacacctacggttattttgaaagcaaaacaataaagaaacaatcagaatttttaagctcattaaaaaaatggggatttaaaacaagtgagcacaataaagttttaaaaactattaatgatttggaaaattttcacaaaaattttgaaaaagatagatttgaattagaat

SEQ ID NO: 319776 - DNA, 399 bp, Unknown
  Bacterial polypeptide expressing nucleotide sequence isolated from the Sargasso Sea
aaaaattcccagatgatatagatataagaggtgaggtttttatattaaatagtgattttgaaaaaattaaaaaaaattttgcaaatcccagaaatgcagcatctggatcattgaggcaaaaaaaccctaatgagacaaaaaaaattcctcttaaatttattgcttatacttttggcttttgtaataaaaatatatttttaaaacaatctgattttataagatctcttaaaagttggggttttaaaattagcaaatataataaaataatttctgggactgataatttatttaaaaatcatctagattttgaaaacaaaagatttgaaatagattacgatattgatgggttagtttataaagtaaatgattttaaattacagaaaagattaggttcataac

SEQ ID NO: 319777 - DNA, 874 bp, Unknown
  Bacterial polypeptide expressing nucleotide sequence isolated from the Sargasso Sea
gatggataaagaagacaaaattttaaaaaggttaagagaacttgctaatttaatcaaaaaacataattataattatcacacattagataaacctaaaataactgatcaagaatttgataagttagttaaagaaaatgatattttagaaaaaaaatatccaagtttaattttaaaagatagtcctaacaaaaattatggcggtaaaataaaagacaacttcaaaaaaattaaacatgaatctcaaatgtactcacttgcaaatgcttttaattacaatgatataaaagaatttataaaacgttctataaaatttttaaatttagataatgatgatgattttcaatatatatgtgaaccaaaaattgatggactgtctttaaatcttgtctatgaaaatggcaatttggtttctgctggtacaagaggagatggattcattggagaagatgttactgaaaatatttcaaatataaaaaatattccatctaaattaaaaaaaaactttccagattttattgaaattagaggagaggttttcttaaataaaagtgattttgagaaacttaattctaaattagaaaataaatctaaatttgcaaatccaaggaatgctgcagctggcagtctaagacaacttgatacttctattagccatagcagacctttaaaattcatacctcatggcattggtaaatgttcagataattttgataaaattgaggattattataatcaactaaaaaattgggatattattcctaataagctaagcaaaaaatgttactctgttgaagaaattattaaattttataatcaaatagatcacaaacgttcagatattaattatgatattgatggattggttgtaaaaata

SEQ ID NO: 319778 - DNA, 918 bp, Unknown
  Bacterial polypeptide expressing nucleotide sequence isolated from the Sargasso Sea
agaggagttaggttttactgcaaaaagtccaagatgggccattgcctataaatttcaaacgcaacaagtagagacgctactaaacagtataagctaccaagttggcagaacaggagccattactcctgttgcaaatctagagcctgtgttgttggcagggactacagtaaagcgagcttccttgcacaatgcagaccaaattgaaaaacttgacatccgattgggcgatattgtgaaggttgaaaagggaggggagattattcccaaagtcgtgggggtaaatctagagaaaaggaaggcggattcagtagctgtaaactatataaaccactgtccagaatgcaatactgaattacaacgtattgatggagaggcgcagcactattgtccaaatgtatatgcatgccctccacaaataaaaggtagaatgattcattttattggcagaaaagcgatgaatgttgatggaatgggagaagaaaccatcgagcttttgtacgatgcgggcctgataaagaacattgcagatttgtatgaattaaatgcagagcaattactgcctttagaacgtatggctgaaacttctgtaaataaactccttgagggcattcaatcctcaaaagaagtagcttttccgaaagttttatttgcgattggcatacgacatgttggagaaactgtagcgaaaaagttagctaaatattttaaggatatgcagtcgcttgcctcagcaagcattgaagatttagttccggttgatgagatcggagaaaaaatcgcaactagtgtggtcaatttcttccaagacgatgaaaatataaagatcatacaacgtttaaaggagtcaggacttcagatgagtattacagaaaatgagcagaccatagagtctactattttagaagataaaaaaattgt

SEQ ID NO: 319779 - DNA, 889 bp, Unknown
  Bacterial polypeptide expressing nucleotide sequence isolated from the Sargasso Sea
aaaaaaaaatataaatttctcaaacataaagaatctccgtctataaatattggtttcaaaccatccaaaattttcgaaaagcataaacataaagttccaatgttgtcattatctaatgtttttaatagagatgatataataaattttgaaaaaaaaattaaaaattatttaggttttaattttaataaatactttgagtatagtgttgaacccaaaatagatggtatatctgcatctttaacttatgaaaaaggaaaattaacaataggtctatcaagaggagatggatatgaaggagaggtaattacagaaaatttaaaaacaattaatgaaataccaaaagttataaattcaaaagattttccacaaaacgtagaaattagaggggaagtttatattacaaaaaaagattttgagcagctaaaagaaaaatttgctaatccaagaaatgcagcatctggatcattaaggcaaaaaagttctgaagagacaaaaaaaattccactcaaatttattgcttatacttttggccatttaccaaataacaaatttacagaccaatcagaatttttaaaatcacttaaaaaatggggttttaaaacaagtaaatataataagattatatcaagcatagatgaactaattaataatcaccaagtttttgaaaaaaaaagatatgaattagaatatgatgtagatggtttggtttataagatcaacgatctttcactacaaagtagattaggttttgtaggtaacgcgcctagatgggcggctgcacataaattttctgctgcgtcctctttttcaaaaattttaaacattgaagttcaagtaggtaggacaggtgcgttaacgccagtcgcaaaaatagagccagttaatatgg

SEQ ID NO: 319780 - DNA, 665 bp, Unknown
  Bacterial polypeptide expressing nucleotide sequence isolated from the Sargasso Sea
tatgcaaaaaagagaaattaagaaaatatactttgataaaattaatgaattaaagaaacataattttcaatactttgaaaaaaatgaacctaggatttcagatcataattatgacaaattaaaaaaagagatacttgatctagaaaagaaatacaattttctgtattcgaaatattctccatcaaattcagtaggattttatccatctaaaaattttttaaaagcgcagcatagagtaaaaatgctctcattatcaaatgcattcgataaaaatgatttagaaaattttgaaaaaaaaattgcaaattacctaaattttaatcaaaaaatgagtttagaatatagtgtggaaccaaaaatagacggaatatctgcatcattaacttataaaaatggtttacttgtatcaggtttatctagaggagatggtaaagaaggtgagctgattactgaaaatttaaaaacaattaatgacatcccaaacaaagtaatttctgaagatttcccaaaggatattgacataagaggtgaagtatttattacaaataaagattttgaaaaaataaaagacaattttgcaaacccaaggaacgcggcctctggttctttaagacaaaagaatcctatagagactaaaaaaattccacttaggtttattgcttatt

SEQ ID NO: 319781 - DNA, 785 bp, Unknown
  Bacterial polypeptide expressing nucleotide sequence isolated from the Sargasso Sea
aaaaaagtatacttttgatttagagaaaaaatataaatatttatctcataagaactcaccctcaaaaaatataggttttaaaccttctaaaaattttaaaaaacaaaaacataaggttccaatgttatctttatcaaatatttttaataaagaagatttagaaaatttcgaaaaaaaaataaaaaattatttagattttaatcaaattcaaaaatttgaatatagtgtagaaccaaaaatagatggtatttctgcgtcactaacctatgtaaatggaaatttagaattaggtgtttcaagaggtgatgggtatgaaggagagcttattacagaaaatttaaaaacaattaacgatataccgaaaaaaattaatttaaaaggttttcctaaaaatatagaaataagaggtgaagtttatataaataaaagtgactttgaaaatttaaaagaaaaatttgcaaatcctagaaatgccgcatcaggctctttaagacaaaaggagtctattgaaacaaaaaaaattcctttaaaatttattgcatatacatttggtttatttgaagataattatttcaacaaacaatctgagtttctgaattcgttagaaaagtggggtttcaaaacaagcaaatataataaagtaatatcaaatatagatgagttaataaaaaatcacgaagcctttgaaaaaaaaagatatgaattagaatatgatgttgatggtttagtctacaaattaaataatcttaaacttcaaagtagattaggttttgtaggtaatgccc

SEQ ID NO: 319782 - DNA, 391 bp, Unknown
  Bacterial polypeptide expressing nucleotide sequence isolated from the Sargasso Sea
aatgaaagacttattaaaaaaatatgaacaacttaaagaggaaatccagcttcacaattacaattatcatgccctagatgatccaaaaatatcagatggtgagtatgacaaactctttagaagtttgcttgatttagaggaggagaatcctcaccttgtgactccagattctccaacgcaaagggtaggattttctccaatagatgaatttgaaacatttgaacactctgtaccgatgctttctttagctaatgtgttcagtgaagaagagttttcagatttccatgaccgtattttaaaacgtcttgtaaatattgatgattttgagtatttctgtgagcccaagatggatggagcagcagtatcactaatttacgaaaatggatactag

SEQ ID NO: 319783 - DNA, 606 bp, Unknown
  Bacterial polypeptide expressing nucleotide sequence isolated from the Sargasso Sea
tctgaataaaattaaactcataaataaatataataaattttattattctgagagtaaaccattagttgatgatagttcttatgataaaattaaaggtgagatattgaatcttgagaaaaggtatccatttttaaaaagcgatgattcaccatctttaagcgtaggttttaagccttcaaaaaattttaagaaagtagatcataaagtaccaatgctatcattgggtaatgctttcgataaaaatgatttggctaacttcgaaaaaaaaattatcaattttttaagcttaaaaaaaaatcaaaagatagaatatagtaccgaacctaagatagatggtatttcagcatctttattttatagagatggtatttttgagcaaggtctgtccagaggtgatggaattcaaggtgaagatataactgaaaacctaagaacgattaaagatattccaaaaaaattaaatggaaatgattttcctgatgaaattgatattcgtggagaagtatttattaataattctgattttgtaaaactaaaaaataagtttgccaatccaagaaacgctgcctcaggatccttaagacaaaaagacccacgtgagacaaa

SEQ ID NO: 319784 - DNA, 724 bp, Unknown
  Bacterial polypeptide expressing nucleotide sequence isolated from the Sargasso Sea
ttttcaccatttaatgcattaggttatactccatctaaaaattttgagaaagctgctcatagagttaaaatgctatctttatccaatgcttttaacttagaagacttagaaaactttgaaaaaaaaatatttaattacttaaaccataaaactgaaattgaatatagcgctgagccaaagatagatggtatttcagcatcattaacttacaaaaatggtgttttagttttaggcacatcaagaggtgatggtacaactggtgaggtaattacagataatttaaagacaattaaagatataccaaaaaaaataactgataaagactttccaaaagatattgatataagaggagaggtttttataaaaaaaagtcaatttaataatttaaaaaataattttgcaaatccaagaaatgctgcatcaggttcattaagacaaaaaaatcctgaggtaacaaaaaagattcctcttaattttgttgcttatacttttggttattttgaaagtgataaaatcaaaaaacaatcagactttttaaagtcattacaaaaatggggttttaaaatcagtgaacataataaagttttaaaaaatataaatgaattagaaaattttcataaaagatttgaagaagatagatttaatttagaatatgatgttgatggcttagtatataaaattaacaatttagaacttcaaaaaagattaggctttacctcaaatt

SEQ ID NO: 319785 - DNA, 789 bp, Unknown
  Bacterial polypeptide expressing nucleotide sequence isolated from the Sargasso Sea
aatgagaagtaatgacagcaaattgataaagaaaaaatatttaaaaaaaattaatttaattaataaatataacaaagcttattataaaaataataatccgataattgatgattttgaatatgataatcttaaattagaaattttagatttagaaaataaatataagtttttaaaaagtgaaaaatctccatcattagttgttggatttaaaccatcaaagaattttaaaaaagtaaaacataaaagaccaatgctttcactgggaaatgcttttaataaagacgacttattaaattttgaaaaaaaaatttttaactttttgagtttaaataaaaacacaattattgagtatagtgcagaacctaaaattgatggaatttcagcttcattgttctataaaaatggaaaatttatacaaggtctttctagaggtgatggtatagaaggtgaagatataactgaaaacttaaaaaccatcaaggatattccaaaaaatatttctaataaaaattttccagaagaaatagatattagaggtgaggtttatattggaaataaagattttgtttcaataaaaaataaatttgccaacccaagaaatgctgcatctggatcactaagacaaaaaaaccctgatgaaactgctaaaataccattaagatttattgcatacacatatggattttcaaaagaattaaatattaatactcaatctgaatttttaaaaagtttaaagctttgggggtttagaataaactattacaataatgtaattaaaggtattgataa

SEQ ID NO: 319786 - DNA, 749 bp, Unknown
  Bacterial polypeptide expressing nucleotide sequence isolated from the Sargasso Sea
aacacaaagagtaggaactagtcctgctgaagcatttaatcaagtaacccatactgttccaatgcttagtctttctaatgtttttggagatgaggatttaatagattggattgataaaaccacaaaagcagtaaatcaaaatattttcccattagtttgtgagcttaaaattgacggattagctgtttcagtaaagtatgatgatggaaaattatttcaaggggcaaccagaggtaatggagtcgaaggtgaagacattacaaataatgtaaaaacgattagatctattcctttagaaatagaagataaaaatacaattgaagcacgaggggaaattttttttcctaattcgagatttaccaatttgaacgaacaaagagaatcagaaggactaagtactttctcaaaccctagaaatgctgcctcaggttctgtaagacagcttgatccaaatgaaacagcaaaaagacctttggatatatttttctatagtttatacaacatagaaggacaagaaatatttgattctcagtataaatcattacaagaaatgaaaaaattaggactcaagacaaataaaaactacaaaaaaattcaaaacaaacaagagctttttgaatatatagaattctggtcaaacaacagagcaaatctagattatggtactgatggaatagtaatcaagattgatgatgttaaaattcaaaaaaaacttggaagcaccggaaggattcccaaatgggctactg

SEQ ID NO: 319787 - DNA, 841 bp, Unknown
  Bacterial polypeptide expressing nucleotide sequence isolated from the Sargasso Sea
attgaaatttttgaaaattttcctgaatacaattttaatataaatctcttaaataaaattggcgataaaccctccccattatttagtaaaataaagcatgaatttcctatgctatccttgacaaatgcatttacaaaaactgatatctttgagtttgatgatagaataagaaagtatttaaccttaaaaaatagtcaaaaaattgatatggtttctgaacccaaaatagacggtctatccatatcaattagatatgaaaatggggttttagttcaggcttcaactaggggggatggatttgaaggtgaagatgttttattaaacgtaaaaacaatagaggatattcctaaatatttgaaattcaccaaaccaaatattttagaggttagaggtgaaatttttatgaaaaaaattaactttttaaatttaaactctactttgaaagatttaaaattaaaattatttgccaatccaagaaatgcagccgctggatcattaagacaaaaagaccccaaagtaactaaaaatagaagtttaaatttttttgcttatgatattggatttgtctctgaaaaattttctgaaacccattgggaaactcttactagattgaaagagtatggttttcctgttaatagtttatctaaaatatttgatgatattcgagataatattaaatattttgatgaaatttctaaattaagatctaatttagattatgatattgatggtgttgttcttaaaattaataatttgaattttcaaaaacgtttaggaaatatttctcgttcaccaagatgggccatcgcacaaaaactaccctcccaaaaaggacaaactg

SEQ ID NO: 319788 - DNA, 718 bp, Unknown
  Bacterial polypeptide expressing nucleotide sequence isolated from the Sargasso Sea
aaatcaaaactatcaaaataaaataaatgaatttaagaaacataataaattatactatgaaaatagttctccaataatttctgataaaaaatttgataaactaaaaaaagaaatattggatttagaaaaaaaatatacttttttaaaaagtaatttttctccctcaaaagcggtaggttttaagccatcaaaaaattttcttaaatttaaacatcgtcaacaaatgttatcattgtcaaatgcttttaaagaagaagatttgttaaattttgaaaaaaaaatattaaattttttaaatgaaaaagttgacttggaatatagtgttgagcctaaaattgatggaatatcagcttctttaacttataaaaatggcattcttaattatggggtatccagaggagacggcaaagaaggagaaataattacagataatttgaaaactataaaagacatacctcataaaattgtaaatagtaattttcctaaagatatagaaattagaggagaggtttttattaataaaaatgattttgaaaaaatcaaagatagttttgcaaatcctagaaatgctgcctcaggatctttaagacaaaaaaatccagaagaaacaagaaaaattcctttaaattttattgcttatacttttggatattttcaagataatgaatttaagttacaatctgattttttaaagcatctaaaaatttgggggatttaa

SEQ ID NO: 319789 - DNA, 736 bp, Unknown
  Bacterial polypeptide expressing nucleotide sequence isolated from the Sargasso Sea
aatgaattttgaggaaattaaaaaaaaatataataaaaagattaatgaaattttaaaacataatgaaaattattatgataaaaataatcctttaatatctgatgagaaatatgatgaacttaaaaaagaaatattagaccttgaaaaaaaacacaaatttttagctagtgataaatcaccttcaaaaattgttggatttaaaccctcaaaaaattttagaaaagtcaaacatagagtttcaatgttatctttatctaacgcatttaatgaagaagatttaattaattttgaaaaaaaaattattaattttttagataaaaaaaaagatttacaaatagagtatagtgctgagcctaaaattgatggtatatccgcgtctttattatatgaaaatggaaaatttataactggattatcaagaggagatggaaaagaaggtgaggatataacagaaaatttaaaaactataaaagatattccacttgaaattgactcaaaaaattttcctcaagaaatagatatcagaggagaagtttttattcgaaactcagattttaaaaagttatccgacaagtttgcaaatccaagaaatgctgcctctggctctttaagacaaaaaaatccaaatgaaaccaaaaaaattccacttagattcattgcttacacatatggatttgaaaaaaatatgaaaatagacactcaaagtgaatatttaaaaaatttaaaaaaatggggg

SEQ ID NO: 319790 - DNA, 798 bp, Unknown
  Bacterial polypeptide expressing nucleotide sequence isolated from the Sargasso Sea
aatgaaaaaagaagaaatcaataaaagatatagaaaacaaaagaagcttttagataaatataatcatcattatttcaacttagacgctccgttaatatcagactctaaatatgataaaataaaaaatgaagtaattgaaattgagaaaaattacccctttttagtcgaaaaaaagtctgttctggaccaagttggcgcaccaattacaaaaaaatttaaaaaaataaaacattcgatacctatgctttcactttcaaatacgtttgataccaccggcatgaatgattttataagtaaagtctcaaattatttaaacattaaaaataaaaattttaccttttcctctgaacttaaaattgatggcatatcagcttctttaacttataaaaaaggaattttaataaaaggtttatccagaggtgatggggttactggggaagacatcttagaaaatttaaaaacaattaaagatataccaaaaaaaatatcagatgaatatttgcctgaaattttagaggtaagaggtgaagtttatataggaaaaaaagattttaaaaaaataaaaaaaaattttgccaatcctagaaatgcagctggaggctctttaagacaaaaagacccaaaagaaacgaataaaatacctttaaaattctttgcttatggttttggtgtaataaaccccatgatttataaaaaacaatctgaatttattttaaaattaaaagattggggatttaatgtaaatccattaaatactttagtaaaaggggttgaacaaattgagaagcaccataaaaa

SEQ ID NO: 319791 - DNA, 879 bp, Unknown
  Bacterial polypeptide expressing nucleotide sequence isolated from the Sargasso Sea
gaaaaaaaatataatttttttaaaaagtaatttttctccctcagaagcagtaggttttaagccatcaaaaaattttcttaaatttaaacatcgacaaaaaatgctatccttatcaaatgcctttaaggaagaagatttagtaaattttgaaaaaaaaatattaaattttctaaatgaaaaaattaatttagaatatagtgttgaacctaaaattgatggaatttcagcttctttaacttataaaaatggtattcttaattatggagtatcaagaggagatggaaatgaaggagaaataatcacagacaatttaaaaactattaaggacatacctcataaagttgaaaataataattttccaaaagatatagaaattagaggtgaggtttttataaataaaaatgattttgaaaaaattaaagatacttttgcaaatcctagaaatgctgcatctggaactttgagacagaaaaatccagaagaaacaagaaagattccattaaattttatagcttatacttttgggtattttgaagataatcaatttaatttacaatctgattttttaaaaaatctaaaaatttggggatttaaaataagcgaacataataaaatcgcaaaagatattagtggattggtatctcttcataaaaaatatgaaaaagagagatttcaattagaatatgatgtagacggtctagtttataaagttaacaacttgcaattacaaaaaagactaggttttacatctaatgcacctagatgggcaattgcacataaattttctgctgattattcttattcagaaattttaaatatagatatacaggtaggaagaacaggagctttaacacctgtggcaaaagtaaaacctataaa

SEQ ID NO: 319792 - DNA, 886 bp, Unknown
  Bacterial polypeptide expressing nucleotide sequence isolated from the Sargasso Sea
ggggtcgttctacgaggtgagtttattatctccaagtccacatttcaaaccaaatacgccgacaagtttgcaaatccgcgaaacttcgtggccggcgtggtgaaccaaaaaaaggtggatccggacaagttcaaggatattgactttgtttgttatgaggtaatccagccaccactgaaaccatcggagcaaatggcatttctctccacgatggattctacaaagatgattcctgtgaagcacacaacccaacctatctcaatggagactcttacgaacgactatcttgcgagcacgctccaagagtggcgaacccactacgaatacgagattgacggtgtgatctgtagcgacgaccaaatctacccgcgaaccaagggaaacccggcacactcctttgccttcaagatgatgttgtccgagcaaatggtagaggcaaaagtggtgaatgtccactgggcggccagtaaggatgggtacctcaaaccacgcgtccaaatagaaccgatcgtcttgggcggcgtgcgcatcgaatacgccaccggattcaacgccaaattcgtcaatgaccaaggtatcaacgcgggcgcaatcgtgcgcatcattcgctcgggtgatgtaataccacatattgtggaggtggtcgaacccgcaaccacgccaggaatgcccaccatagattacgagtggaaccaaacgggtgtggatattgtcctgaaaaatccagaagatgacgcgatggtgagagagaaaaccattgcgggattctttcggaacattggtgtggacggattaagcacaggtcacactcgcaagttgatcgaggcagggtttgacacgatacccaagataatcagcatgacccaagacgatttcctcaatggga

SEQ ID NO: 319793 - DNA, 817 bp, Unknown
  Bacterial polypeptide expressing nucleotide sequence isolated from the Sargasso Sea
atgcctatgttatctttatcaaatgcttttgataaagatgacttattaaattttgaaaaaaaaatttataattacttaaataagaatattaattttgaatacagtgttgaacccaagattgatggaatatcagcatcattaacatataaaaataataaattagcctatggagtttcaagaggtgacggtaatgttggtgagattatcactgaaaatttaaaaactatacgagatattcctttagagataaaaaatactgattttccagatgaaatagaaataagaggagaagtatttataaaaaaaaaagattttttaaaaatcaaggaaaactttgcaaatcctagaaatgctgcttctggaacactaaggcaaaaagatcctaatgagacaaaaaaaattcctttaaactttattgcttacacatttggatttgtgaaacaaaataacattaaatatcagtctgagtttttaaaagcactaaaatcatggggctttcaggttaacaaagaaaataaagttataaaaacaataaatgaattgattgaatttcatactaaatttgaagataaaagatttgatttagaatatgatgtagatggattagtttataaagtaaatgatttaaacttgcaaagtagacttggtttcacatccaattctccaagatgggcaatagcacataaattttcagcggacagcgcttatacaaaaattataaatattgatatacaagttggaagaacaggcgcattaactccagtagctaaggtagagccaataaatattggaggtgtgatagtttctaatgccacgc

SEQ ID NO: 319794 - DNA, 832 bp, Unknown
  Bacterial polypeptide expressing nucleotide sequence isolated from the Sargasso Sea
taataattcagtaaaaaaagattatttaaaaaaaataaaattaattaataaatacaataaattttattatgacaaaagcgatccctcagtaagtgatcaagaatatgaccagttaaaaaaaaatattctaaaaatagaagaaaaatatccagaaataatcatcaaaggttctccatcacaagtagttggcttcaaaccttctagaaactttaaaaaaataaaacacaaagtaccaatgctttctttaaataatgcttttgacgagaacgatttaaaaaattttgaaaaaaaaataattaattttttaagtttaaataaaaatgcacagatagaatatagtattgaaccaaaaattgatggcatatcagcttcaataaaatatgaaaatggaattttagcaaaagggctttcaagaggtgatggaatagaaggagaagatattacagaaaatcttaaaacaattgaggatataccaaaaaaaataatatccaaaaattttccaaaagaaattgatattagaggagaagtgtttattacaaaaaataattttaaaaagatgaataaaaaatttgcaaatccaagaaatgctgcctctggatctttaagacaaaaggaccctttggaaacaaaaaaaatacctttaaattttgtagcatacacctttgggtatttagaaaaaaatatttttggaaaccaatctaactttttgcaatttttaaataattggggttttaaaacgagcaaacataataaaacaatgaaaggtattaaaaatttggtattacatcacaaaaaatttgaagaaataagatatgatctagattacgatatt

SEQ ID NO: 319795 - DNA, 556 bp, Unknown
  Bacterial polypeptide expressing nucleotide sequence isolated from the Sargasso Sea
tctaaatttacaaaaaagattaggtaatacctctaattcacccagatgggcaattgcttataaattctcagctgaaaaagctatcacccaaattaaagatataattattcaggtgggaagaactggagcaataaccccagtagctaaagttgaaccagttactgtaggaggggtagtggtatcaaatgcaactttgcataatgaagaagagattaataggaaagacattagaataggtgacactgtaactattcaaagagcaggcgatgttattcctcaagtaatttctacagataaatcaaaacgaagcaaggaaagtaaaaaatattttttccctaagcgatgtctttgtggatctatttctgtaaaagaagtgagcaagtctacaaaaaaaatggatgcagtcagaagatgtctaaagggatatgaatgtgattttatagcaagggaaaaattgaaacatatcgtctcaaaagatgcatttaatattgatggttttggaaaaaaagtcattgatcaattttgggatttaaaattagttagaaaaccatctgat

SEQ ID NO: 319796 - DNA, 882 bp, Unknown
  Bacterial polypeptide expressing nucleotide sequence isolated from the Sargasso Sea
tttggattacgatgttgatggagtagtttacaaagttaataatttagattttcaggaaagattaggttctaccgcaaactctccgcggtgggctatcgcatataaattttcatcagtaaaggcttcttcaaaaattataaatattgtaattcaagtagggagaactggagcaattacacctgtagcaaaaattaatcctgtaactgtaggtggtgttgtagtttcaaatgcaacattacataatgaagatgaaattaatagaaaagatataagaataggggatacagtaacgatacaaagagctggagatgtaattccccaagtactttcagttgacaaagcaaaaagaagtaagaatagtaaaaaatttattttccctacaaaatgtctttgtggtgctataacaaaaaaagaaacaagcgttacaactaaaaaaatagatgcagtaagaagatgtttaaaaggttatgaatgtgattttactgcaaaagaaaaacttaaacatattgtatcaaaagatgcttttgatattgagggattaggaaaaaaggtaatagataatttttggaatttaaatttaataaaaacacctgctgacatttttagattagattatttaaaaattagaaaacttgacggatggggagagttatcaattaaaaatttacaaaatgcaattgataaatcaaaaaatataacgttagacaaatttattttttcaattggaataagacatatcgggcaagaaaatgctaaaattataggtaatttttttaaaaaatctaagcacttttcagaattatttaatgacaaaaagagagctaaaattttacaaaatttagaggatttaaatggaataggtgatactcaaattagatccat

SEQ ID NO: 319797 - DNA, 776 bp, Unknown
  Bacterial polypeptide expressing nucleotide sequence isolated from the Sargasso Sea
cttttcacaagtagaacataggcaaagaatgtacagtcttgataattcagaatatattaatgatattgaaaaatggcttgaaagacttgaaaaaattacagatgaaatgctgtttccaattgttatagaaccaaaaatagatggactcgctatctcattaatttatgaggatggcttatttgttcaaggattaactagaggagatggctttatcggagaggatgtaacacataacgttaaaactattaaaaatatacctttgaaattaaaagaggaaacaaaagggattttagaaataagaggcgaagtttatatgccaacggaaagttttaatatattgaatgattttaataaaaaagaaaatatacccacgtttataaattcaaggaatgctgcagcaggttctttgaggcaaaaagactctaatattacagctacacgtgatctaagattgttatcttatcaactgattaatcatgaagagatagatctttctttaaactattcaaaacaattaaataatcttaaaaaatacggttttcaagttaataacttttatgaagtatcagatataaatgaaatcaaaaaaatattagatgaaatagaaactttgagagataagtttagttatcagattgatggagcagtattgaaaatagattctgcaacttcacaagatcagttagggtttacatctaaagcaccaagatgggctattgcttataaatttcaagcggaagaacaaactactgtcttgaaagatataaaactacaaa

SEQ ID NO: 319798 - DNA, 881 bp, Unknown
  Bacterial polypeptide expressing nucleotide sequence isolated from the Sargasso Sea
tggaatatctgcatcattaacttacataaataaaaaactattatatggtgtatctagaggtgatggaaatgtcggggagttaattacagaaaatcttaaaactataaaagatatcccacaagaaattaaatttaaaaattttccagaagaaattgaaattagaggtgaagtatttataaaaaaaaaagatttcctaaaaattaaagataaatttgcaaatgcaagaaatgcagcatctggctcattaagacaaaaagacccaaaagaaacaaaaaaaattcctcttaattttgttgcttatacatttggatatttgaaaaataattcttttaataaacaatcagattttttaaataaattaaaagagtggggttttaaagtaaataaaaataataataagatatcaacaattaaagatttaattaagtttcataaattatttgagagtaaaagatttaacttagattatgatatagatggtttagtctataaagtaaatgatttaagtatgcaaagtagactaggttttacgtctaatgctccaagatgggcaattgctcataaattttctgccgataaagcaaatacaaagattgtgaacatagatattcaaataggaagaactggggcattaactcctgttgctaaagtagaacctgtaaacataggaggtgttgtagtatcaaatgcaacacttcataatgaagatgaaatcaacagaaaagatatacgaattggtgatgttgtaaaaatagaaagagctggggatgtgatacctcatgtaattgaagttgataaaaccaaaagaaaatccgattcaaaaaaatatgagtttccgagtgtttgtccctcatgtggttcgcagacaattaaagaattta

SEQ ID NO: 319799 - DNA, 931 bp, Unknown
  Bacterial polypeptide expressing nucleotide sequence isolated from the Sargasso Sea
ttccaaatcaattctcattgcaaaacaattaaatcaattgatgaaatagaaaaaaatcatggagaactagaaagcctaagatcaagtttggattatgatttagacggaatagtttacaaggttaatgatttaaaatttcaagaaagacttggttccacatctaattctccaagatgggcaattgcttacaaattttcttcggttaaagcctcttccaaaatcaaagatatagtaatccaagttggaaggactggtgctattactccagtagcaaaaatcgatcctgttacggttggtggcgttgttatttccaacgcaactttgcataacgaggatgaaattaacagaaaagatataagagtaggagatactgttacaatacaacgagctggcgatgtaattccacaggttgtttcagtagacaaatctaaaagaagtaaaaacagtaaaaaatttatttttccaagtaaatgtctttgtggttttcccacaaaaaaagaaatcaatttagtcactaaaaaagcagatgcagttagaagatgtgccagaggttacgaatgtgattttaccgcaagagaaaagctgaaacacatagtttcaaaagatgcttttgatattgagggcttgggcaaaaaagtaatagataatttttgggaattaaaatttataaaaacaccggctgatattttccgcctaaattatgatcaaatagaaaagctagagggttggggtgagctttccataaaaaatttacaaaaagcaattaaagattcaaaggcaatagttttagatagatttatttattcaataggaattaggcatataggtcaagaaaacgcaaaaattttaggagcattttttaagacagataaaaaattttcagaattatttagccccaaaaaaaagaaaagatattttaaagagtctgtac

SEQ ID NO: 319800 - DNA, 1479 bp, Unknown
  Bacterial polypeptide expressing nucleotide sequence isolated from the Sargasso Sea
aatgaaaaaagacagtgccttaaaaacatataacaataaaaaaaaattaatattaaaatatgatcatcattattttaatcttgactctccattagtttctgatgctaagtatgataaaattaaacaagaactcataaaacttgaggaacagtttacttttttaaaaaaaaaagagtcaatacaaaataaagtcggagctccgttaacaagaaaatttaaaaaaatcaaacactcaaagccaatgctttcactttcaaatacatttaatgcgaaaggaatggaagactttatcagtaaaatttcaaattttcttaattctaaaaacaaagactttgatttttcatctgaacttaaaatagatggaatatcagcatctttaacctatgaaaaaggagttttaattaaaggtttatctagaggagatggggttactggtgaggatatattagaaaatttgaaaactataaaacaaataccaaaaaaaatatttgataaaaatttaccagaagttttagaagtaagaggagaagtttatataggaaaaaaagattttaagtctataaaaaaaaattttgccaacccaagaaatgctgccggaggttcattaagacaaaaagattttagagaaacaaaaaaaattcccttaaaattttttgcatatggattcggggttatagagccgatgatttataaatcacaatctgaatttatcaagaaattaaaagaatggggatttagtactaatgaacataataaacttgttaacggtattgatgaaattgaaatccatcataagaaattagaatcaataagatcaacgcttgattatgatatagatggactagtttataaaatagatgatataagtttgcaaaaacggcttggaaacacttctaactctcctcgttgggcaacagcatataaattttcttctgagaaagcaatttctagaattaaaaatatcttaattcaagtaggaaggacaggcgccataactcctgtagcaaaaatagaaccagttactgttggcggggttgtagtttcaaatgctactttacataatcaagatgaaattttaagaaaagatataaggataggagatactattgttattcaaagagctggcgatgtaattcctcaagttgtttcagtagatattaacaaaagaagtaaagggactaaaaaatatattttccctaaaaaatgtttatgcggaggaaaaatttttaaagaatttaattcaactacaaagaaagaagactcagtgcaacgatgtatcaaagaatatgattgttcatttattgcaaaagagaagctcaaacacatagtttccaaagaagcttttaatattgagggattaggaaaaaaagtaatcgagcagttttggaagttaaacttaattaaaaatccttcagatatttttaatctagattacaaaaaaattgttaaacttgaaggatggggagaattgtcggtaga

SEQ ID NO: 319801 - DNA, 1566 bp, Unknown
  Bacterial polypeptide expressing nucleotide sequence isolated from the Sargasso Sea
acattgaagatataccagatcaagttaaatcaaaaaattttccaaaagaaattgatataagaggcgaagtgttcattaaaaataatgattttaaaaaattaagcaataattttgcaaacccaagaaatgctgcctctggatctttaagacaaaagaatccagaagaaacaaaaaaaattccattaaaatttatagcttatacttttggttacgaacgaggtttagaggtttctttgcaaagtgagtatttaaaaaagctaaaattttggggatttaaaacaaaccctttaaataaaactattaaaaatgtgaaaaatttaatgaaaaattacaatgaaatagaaaaaaaaagaggtgacttagattttgatatagatggaattgtttataaagttaatgattttaaattacaaaaaagattaggtaatgttgcaaacgctccaagatgggcagttgctcataagttttcagccaacagtactgtctcaaaaatagagaatattgaaattcaaattggaagaacgggagctttaacacccgttgccaaaataaaacctgtaaatattggaggtgtagtagtctctaatgctactttacataatgaagaagaaatagttcgtaaagatattagaataggagatacagttgtagttgagagagcaggtgatgtaatacctcatgtagtttctgttgataaaggaaagagaaaaacagactcaaaaaagtttatttttcccacaaagtgtccatgtggttttgatacaattaaagaatttaacaaagtaacaaaaaaatttgatgcagttagaagatgtccagatagaggttttgattgtgataaaatggctaaggaaagattgaaacattttgtttcaaaagaagctttaaatatagagggattaggaaaaaaaatagttgaaaatttttggagtttaaatttaataaaattacctcaagatatattcaaaattgattataacaaagttgaaaatttagatggttggggaaaacaatctgttgcaaatcttaggtattcaataaattcgaaaaagaaaatttcttttgaaaaatttatatatgctttaggtataagacatattggtttagagaacgctaagatcttatcaaaaaatttaaaatcattaaaaaattttatgttattatcaaaaaaaaatgatcttagtgatttactaaatattgatggaattggtgaaacacaaatcaattcgattaaaaacttttttttaaataatacaaataagaaggttttaaaggagcttgaggaagtgcttgttgtaaaagatgcaaaaattaaaaaaatggatggtttattaaataacaaaacatttatgtttactgggaagcttctaggaataagcagggcagaggctaaatcattaattgaggaaaattcaggatctatagttagtaacgtttcaaaaaaattaaattatttaattattggggaaaaaccaacaaagaaaaaagttttaaacgcaaaagaactcaaaattgagataattgatcaaaatcaatttttgaaaatgctaaataaaactagctaac

SEQ ID NO: 319802 - DNA, 1591 bp, Unknown
  Bacterial polypeptide expressing nucleotide sequence isolated from the Sargasso Sea
ttttagaactagaaaaaactatgattacttaaagcatatagattctccttctaataccataggttttaaaccatcaaaaaaatttcaaaaaaaaaaccataaagttcccatgttatctttgtcaaatatatttgataaggaagatttaaataattttgagaaaaaaattaaaaattacctgaatattaatagcaaacaatcttttgagtatagcgtagaaccaaaaatagacgggatttctgcgtctctgacctatgaaaatggaaaattagttttaggtttatccagaggagatggatatgagggagaagtaattactgaaaatttgaaaacaataaaagatatccctaaaaaaattgaagcaaaagattttccaacaaatatagaaattagaggtgaggtgtacattacaaaaggtgattttgaaaatttaaaggaaaaatttgcaaatccaagaaatgcagcttctggttcacttagacaaaaggaaccttcagaaacccaaaaaattccattacattttattgcttatacctttggtttttttgaaaataataaatttataaaacaatctgatttcttaaaatcactgaggcaatggggatttcaaacgagcaaatataattctgtaattctaaatattaatgatttaattaaaaatcatataatctttgagtcaaaaagatacgaactagattatgatgtagatgggcttgtttataaaataaatgatttgaaattacaaaacagactaggttttgtaggcaatgctccaagatgggcagcagctcataagttctctgccgcatcatcattttcaaaaattgtaaatattgaaatccaaataggtagaacgggtgcgctaacaccggttgcaaaaattgaaccagttaatataggcggggtaattgtatcaaatgcaacacttcataatgaggatgagataaataaaaaagatattagagttggagatgtagtaaaaattgaaagagcgggtgacgtaattccacatgtcgtatctgtagatttatctaaaaggaaatctaatgtttcaaaatataaatttcccaacaaatgcccttcttgtggatctaaaattgaaaaagaatataatcaacagaccaaaaaatttgatgcagtgaaaagatgctcatccgaaggctattcttgtgagaaaatatctgttgaaaaaatcaaacattttgtatcaaaagaagcattaaacatcgatggactaggaaaaaaagttgtagaaaagttttgggaccaaaactttatacgatatcctcaagatatttttaaattagattttaaaaaaatcgaaaaattagagggatgggggccacaatctgtctcaaatttaaaacacgctattgataaatcaaaaaagatatcactaagtaaatttatatttgcattgggaatacgacatattggacaagaaaacgccaagttaattgccaaacatttaaaaacaaaagaaaattttattaagattaataaaagttatgattttaaatcattcgaaaacatagatggaataggagaaattcaaatctcttcaattagaaatttttttttgataaaggaa

SEQ ID NO: 319803 - DNA, 859 bp, Unknown
  Bacterial polypeptide expressing nucleotide sequence isolated from the Sargasso Sea
atgacagaattccagcctaaaaaacgcgtcatagatttgagcgatcaactccaacgcttcagacaagcctactactgcggcaactcacaaatcgaagatgaagaatatgatcagcttaaagaagagttacaaaaactggaatttgaatttcctgaactgatccttgacgactctccgttgatccgggtccaggcgaaaccccaggaatcatttcctacccggactcaccgaagcccaatgttaagcctcggcaatgtttattcgatggaagaactgagggactgggaaacaggtctgcaaaaactcctcaacgatgaaaaacctgaatatgtttgtgaactgaaaatcgatggactggctctttccatcctttatgaaaagggtgaactccaggcaggggtaactcgcggagacggaagccagggtgacgaaatcactccaaacctgaagacgctttccaaactcccactgaagttgaagagcccgcttgatcttgaagtccggggggaggtttacctgtcaaaaaaatatttttcagaactgaatcaacgcagacaacttactcaggaacctgaatttaaaaatccaagaaatgctgctgcaggttctgtgaggatgttagacagcaatgaagttcggcgaagaaaattggacctttttgtttacttgcttgcggatggaccattaaaaccgcagcattcggaaaacctacaactactgaaggatctgcaattccccgtcaatcctgaaaccaaaacatgtaaaaacatcgatgaagtaattgaattctgcaggtattgggaacgtcataaagacgaactgccttacgaaatagatggggtagtggtcaaagtcgatg

SEQ ID NO: 319804 - DNA, 754 bp, Unknown
  Bacterial polypeptide expressing nucleotide sequence isolated from the Sargasso Sea
ttggacagtcatcaacctcccggcgtgaccaagaagaaaaaaaccaagccgccccagccgaacggatcggtggatccctccgggaagattcaggcgcttcgggccgaaatcgaagagcacaactaccggtaccatgtgctggacgaccctacaatctcagactcgcgttatgacggcctggttcgagatctagagcagctcgaagcagaatatcctgatctggtgacctcaaattccccgacccagagagtgggggccgctcccctggatcgatttgagtcagtcgctcatgaggtgcccatgttgtctctcaataacgcgttttctgtggatgaggtaggtgaattcgatcgccggtgccggcaaggcacgggccgagaattcctctcctatgtcgcggagccgaagatcgacggactggccatcagcctgttgtacgaacagggcgagttggtacgcgcggcgacccggggcgatggccggacgggtgaagatgtgacgctaaatgtccgttcaatctcttccattcccctgaaactgagatcagaccgtgtcccgccgtcgctagaagtgcgcggcgaagtcttcatgccgatcgcgggatttgcgcgattgaatcagcaacaacaagcgcgtgatgaaaaactctatgtaaatccaagaaacgcggcagcgggcagtttgcgtcaacttgattcgaatgtttgcgcgcagcgaccgttgtcatttttttgctatgcagtgggcgtctggc

SEQ ID NO: 319805 - DNA, 991 bp, Unknown
  Bacterial polypeptide expressing nucleotide sequence isolated from the Sargasso Sea
atgaatgtagaaaataaaatattagaacttagaaagtcattgcatagacataatcacctttattatatgttggataatccagaaatctctgacttacaattcgatcaaatgctaaaagatcttgaagaacttgaaaaaacttatccagaatttcatgattcaaattccccaacacaaagggttggaagttcactaaataacgattttattagtgttcaacataattatccaatgtactcattagaaaattcttacacaaatgacgagttaattaaatggaaagatcgtcttgttaaaatattaaacacagacaaaatatccttttcatgtgaattgaaacttgatggtgtttcaatttcacttagttatcaaaatggcaatcttgtaaggggcttaacaaggggagatgggcagaaaggtgatgatgttaccaaaaacttaaaaaccataaatacaataccattaaagacattaaaaaaaattgattatgattttgatattagaggagaagttgtgattgaaaaaactgattttgagcagttaaataaactaaggttaaaaaacggagaggaaccatatatgaacccaagaaatactgcatctggaagtattaaattggtgagcagtaaagaggtaagaaaaagaccattaaagtgttatttttttcaaatcatctcagaggaaagtccatttaaatctcaatctgagtcactaagtttagcaaaagaattaggttttaacgtttcaaatactcataagtattgtaaaaatattgacgaagtatttgattacattaatttttgggataaagaaagaaaaaatctcaattttgaaatcgacggcatagtaattaaagtaaacaatttaaaaatgcaaactgaattaggatttacttcaaaatttcctcgttgggcaattgctttcaaatttcaaaccgaacaagtaagcacaaaattaattgatataacataccaagtaggtcgtaccggag

SEQ ID NO: 319806 - DNA, 1048 bp, Unknown
  Bacterial polypeptide expressing nucleotide sequence isolated from the Sargasso Sea
atggttcctaacaatgattcttcaaagaatttaatcaacttttcagaaaaagcggcgatcgatgagctagtcagagttcataaggaaattttgttagcagatgttgcttattatcaagaaaacaatccagtaatgcatgactcggagtatgacaaactggtagtttattttgaaaccatccttaaaacccatcctgctgcagcaaaaaagacccggttacaaaaaggaataggtggaaaaccacaattgggatttgagaaagtggatcacaaaattccaatgctttcgttgaccaatgctctgaacagattggatattgaaaattttcaaaagggtataaaaaaatttttgaagttaagtgtcgacacagaaattgcttttacatcagagcctaaaattgatggcctttctttgtcactcaggtacttagatggaaatctggttcaagctgttactcgtggcgatggatatcaaggggaaaatgttaccagtaatatccgattcataagagatgtccctaaaaagttaagtgagaagattcctgtattagaagtacgtggggaagtttatatgagtagaaataatttttctcgcctaaaccaagcccagatagaaaagggacttaaaatttttgctaatcctagaaatgctgcggcaggcactttaaggcaactaaaagttgaagaaggctctgatcgaagattgaacttctttgcttattcatggggggaaaccagttacctattgggtcaaggtcagtttgaggcaatcaataagctggccgaacttggtttcaaaaccaatgaactcacacaaaaatgtgagacgattgatgaacttatttcacactatgaaaaaattttgatagagagagcagatctgaattatgatattgatggggttgtttataaagtagatgacttaagactacagaaacgccttggctttacatcaacagcgcccagatgggcaatcgctcacaagtttccaagtgaaaaagcagtaacacagattttgaatattgagatacaagtcggtaggactggtt

SEQ ID NO: 319807 - DNA, 1132 bp, Unknown
  Bacterial polypeptide expressing nucleotide sequence isolated from the Sargasso Sea
aaactcaatgataaagaaaaattttcaaatccaagaaatgctgctgctgggagtcttaggcagcttgatcctaaaatagcaaaaagtagacctttaagatttatagcacatggcttaggacatactgataaagaatataaaagtataaaaagcttttatgatgatcttacaaattggaaaataccaattaatgacaatatagattttcaaaattcaatagaatcgatgttaaaattttttaagaaaatagaaaataaaagaagttcaataaaatatgatatagatggtatcgtttttaaagttaatgaatataatttacaaaaaagacttggatttgttggcaaaaatcccaggtgggcaatagctttaaaattttctgcagaaaaaacttcaaccgaaattatagatattaactttcaagtaggaagaactggagcaattacaccagttgcaaggttaaaacctgtaaatattggaggagttttagtatcaaatgcaactcttcataattttgaagaaatagaaaaaaaagatattcgaataaatgatttaatagaaattcaaagagcaggtgatgtaattcctcaagttttaagagttttaaaaaagagtattaatagatcaaaaccaatttatgctccaaaaaaatgcccttcttgtaatagcaaaactgttaaagacaaaaatgaagctgtattaagatgcaacaacagtgataattgtaattcacaaattattggaagattagttcattttgtaagtaaaaaaaatatgaatattgacggatttggagaaaaacaaattattcaattttataagtcaaatataataaaaaaaattgaagatatttttttaattcatgagcataaggaaactatactaaatcttgaaggttggggagagctttcatataaaaaccttattaattctattagcaattctaaaaatattgatttagataaatttattttttctcttggaataagatatgtaggtgaaactatatcaaaaattttagctaaagaatttgttaatatcaattcttttttagataaagctaaaaataaagaaaagctctcattaattgatggtttaggtccaaaagttgttgactcaatatttaatttccttt

SEQ ID NO: 319808 - DNA, 1711 bp, Unknown
  Bacterial polypeptide expressing nucleotide sequence isolated from the Sargasso Sea
ctgggatgcagatgtgcgaaaaagacttgggggacaaaaaccatcatacgtttgtgagttgaaaattgatggagttgccgtctcctttatttataggaatggatttttagaggcaggagtaactagaggagatggaaaccagggggaggaaattacatcaaatatcaaaaccataagcagtctgccattaagtataaaagataaaagtgatttggagattcgtggggaagtttacctgaatcgaaaaaatttcaatgctctcaatcagcggcgtacaactaatggagaatcgttgtttaaaaatcccagaaattctgccgcaggttctataaggcttcttgatagtacggaaacccgcagacgaaaattggatgtttttatctataacattgcagaggggggaccacaggaaaatcataccggcaacttggattatctgcgacaaatggactttcctgtcaatagagaaacaaaactagcagatacaatcgaagaggcagtggaatattgccgttactgggaagatcaaaagcagtatctgccttatgatattgacgggatagttattaaagtaaacgcaatcaaacatcatcgtcagctgggttttacttcttcatcaccccgctgggcaacctcagtaaaattttctgcagaacaggcagtatcagtattgagagaagttgaaattggtgtgggacgtacgggtaacttgacaccggttgcgattcttgaacctgtagaactgaacggtacaacagtttcacgagcaaccctgcataactatgatcaagtagaacgtctaaaccttcacttaggtgaccatgtaacgctggaaaaaggtggtgagataataccgaaaatagtttcagttgatcctactcttcgttctgaaaatgcgcaaaaaattaagcctccatcgaattgtccttcatgtggatcaacagctgaacattttgaagaagatgttgaatggcgctgtcaaaataagaattgtaatgcacagcaaaaggagcaaattttacattttgtttcacgaagggctatggatattgatacgataggaccggctttgattgaacagctgatgcacaaaagacttttaaaaaacgcagcagatttatatcttcttcgtcacaaagatttgtctaaactggatcgtatgggaaacaaatcatcggaaaatgttttagctggcatagataaatccaagcaatgtactttaggtcaatttgtccatgcacttggaattacaaatgttggtgaaaaaactgctggtattttagcacagcatttcgggactcttgaaaaactaatgtctgccgaaagagaagaccttgaaatgatcgaagaaattggtcctgttactgcggaaaatgtattctttttcttcaaggatccagaaaaaaatcaatttattgctgatttcctagcgagaggtgttcagcctatggaagaacaaatactgaagatttctgattcacatttttctggtaaaacggttgttctgacaggtacgctatctgaaccaagagaggtctggaaaaagcgacttattttggctggagcaaaagtgagcaacagtatttccagtaaaactgattatttacttgctggagaaaacgctgggtctaaaatgttaaaagccaaaaaaatggaagtaaacgtgatagatgaaggagtggcaataaactttttagagaatgaaaattaa

SEQ ID NO: 319809 - DNA, 1303 bp, Unknown
  Bacterial polypeptide expressing nucleotide sequence isolated from the Sargasso Sea
tatggtttataaaggtttaacagctgagtatattgacagccttggtagtggggaagctaccttggaagtgaagaagctattgaaattggtttctgaagctgatcgtgcttatcatacagaggatgacccaattattactgacgcagaatatgatacgattaaggttgacatactgcatttagctgaaaaatttccatcggcgttgttggaagtgaaaaaagtagagggtgtgggaggtgagctaggttctgggtttaagaaggtaaaacatgtattgcctatgttaagtctaagcaatggtaggtccaaaaaagatatttataactttgaaaagagcataaggagttttttagggttgtcttgtaacgatcatatctggttcgtatcggagcccaaaattgatggactttcgttagcacttaggtacgagaagggtaaattagttcaagctttaacgcgaggagatggcgttgtaggtgaaaatgttaccctaaatgccaagactttgtccgatatccccaagcgacttttaaataagttagacgtaatggaaattagaggtgaagtttatatgtccaaaaggcatttttctcaattgaataaattccaaaaagagattggtgataagctatttgcaaatccaagaaatgcggctgcagggtcaattcggcagcttgatccaaaaaaaactgctgaacgaaaacttggtttttttgcttactcctttggtgagttgagcgaacctttggccaaaactcattttgaaggattaaaaaagttaaaggagctgggctttaatatcgaccccgctgttacattgtgcgcttcgattgaagaagtactaagtcattacgaagatattgcttttaatagagccaatctggattatgatattgatggagtggtttataaagttgatgatatggaacttcaacggcggcttgggtcaaggtcaacgactcctcggtgggcaattgctcacaaattccccccggcagaagctataactcaaataattgctattgatgttcaggtgggacgcacaggctctctgtctccggtggcaaaattgcggccggtaaatataggtggagttatggtttcgagtgctacgttgcacaatgaagattatatagctgctgtagacaactacggtagctctataagagacggtgttgatattcgtgttaacgactgggttaaggtatttagagcaggcgatgtgattccaaaaattaaaggagttgttttagaaaagagaggacctgaagctcaaaaatttaaatacccggtttcgtgtcct

SEQ ID NO: 319810 - DNA, 904 bp, Unknown
  Bacterial polypeptide expressing nucleotide sequence isolated from the Sargasso Sea
tatggtttcaaatcaaactaaaagacaaatagagaacttaagaatagaaatagaacaagctaatgaagcttattacgttgaagaaaattcatcaatgtctgattttgagtatgataaaaaatttagagaattaattgatttagaaaaaaaataccctgaactaatttctgagaattctccaactcaaagaataggaggccttcctgcagaaaactttaaccaagttcaacacctaactccaatgttaagtttgtcgaatgtttttaattatgaggaattgaaagaatggatagaaagaaactcaaaaactattggtgtaaatatcttccctattatgtgtgaattgaaaattgatggcctagcagtttcagttaaatatataaacgggtttttatctgaagcatcaacgagaggaaatggagttacaggtgaagaaataactaataatgttaaaactataagatctcttcctttgagaattaatagtttagatccattagaatttagaggtgaaatatatttccctaattcaaaatttaatcaatttaataatcaaagagaatccgaaggattaagaatatattcaaaccctagaaatgctgcatcaggttctgttagacaacttgatccctctgaaacttcaaaaagacctataaatatttttttctatagtcttttaaatggtcaggggtcagaattattagattcccaatctaaagctttagataaaataaaagatttaggtttaaggactgaaaaaaattacaaaaaaataaattctttcgaagaattattagaatttattgagtactggagttcaaatagatcaaatttagactatggaacagatggcatagtaataaaaatagataacgtaaattaccaaaaaaaactaggaagtaca

SEQ ID NO: 319811 - DNA, 2103 bp, Unknown
  Bacterial polypeptide expressing nucleotide sequence isolated from the Sargasso Sea
aatgaaaaaatctaatgcttcggaaaatgatagtaaatcaagattagactttctttatgaagagatagttaagcataataaaaaatatcatcaggagaataacccttcaatttcagatgctgaatatgatgatttagtccgagaagctctcgagattgaaaaaaaatttccaaatttaaaaaaaatagattctccaacggatctagtaggagctgaaccagtagaaggttttaaaaaaattaaacatcaaatcccaatgctctcaatacaaaatgcaaaaaatattagtgatgtaaatagttggatagatggattaaggaattttttacttcttaatgacgaagaagaaattgaatttatagcagaaccaaaaattgacggtctctctgctacacttttgtataaaaaaggcgaattaattctgggagcaacaaggggtgatggaagctttggggaggatgttacagaaaacttacgaacaataattgatattcctcaatatttagagaaaaagatagcaccagatattcttgaagttagaggtgaagtatatataacgcatgatgaatttaacgagcttaatgataaacaaaaacaatctggaaaagatatatttaaaaaccctagaaatgctgcagctggctcattaaagcaattagatccaaatgaaacagctaaaagaccattaagattttttgcatttagctgggggctttttcctgaaaacaactttaattatcatagtgatataattaattatttcaatgatttaggattaataactaatcctgaatcaagtaatcataaatcattagaatctttagaaaaatattataataatcttttagataaacgaatggatcttggttatgatattgacggaattgtttacaaattgaacagaatagattggagagataggttacaatctaccggtcatcatcctagatgggcaattgcacataagttcccggcagaaaaagcaatatcagaaattgttgatgttcagatacaggttggtagaacaggtgttttaacacctgtggctcgattaaagccggttaatataggtggagcacttgtttctaatgcaagtctgcataattatgatgatattcaaaaaaaagatattcgtattggggatgctgtatgggttcaaagagctggagatgtaattcctcaggtaatagaagcaatcacttcaaaaagaaaaaaagaaaacaagaaaatttcagtacctacaaattgtcctatctgtaaatcaaatgtttatagggaaattttggctgaaaataatggcgttaaaaccttcgaaaaatacattagatgtacaggaggttttacatgtccttcacaagctaaggaaagactaaagcattttgtgtctaaagaaggcttcgatattgatggacttggagataaacaaattaacgattattttgatatggagattattagagatccaacagatattttttctcttgaaaaaaaatataaagaaaatcccccccaaatatgggtatatacttctggctcaaaatccaaaattaatactataaaagatagtgcaataaaattatttaaagctatcgaagataaaaaaaccataaactttgatcgctttatatattcattaggaataaggcacttgggttcttcaacagcttcattattagcaagccactgtatttctcttaaaaaattgatatctatttttagctcaaaaaattcagaagaaattgatgagatacgatctcttgatggtatcggtgacaaagttgttaatgcgttgatagatttttttcaaaataaagaaacacggagcttggtaaataatcttttagaagtgggagttgaggttcaagattttgaaaagattgagacagatagcatgctttcagaaaaaaggattgttattactgggactttagaaagcatgagtagagctgaagctaaggtaagaattgagtctttaggtggaaaggttgtttcaagtatttcaaagaatactaattatcttataactggcggaaaacctacaaactctaagaaagagaaagcaaattcccttggaattgaaataatcaatgaggaagccatgtt

SEQ ID NO: 319812 - DNA, 931 bp, Unknown
  Bacterial polypeptide expressing nucleotide sequence isolated from the Sargasso Sea
aatgaaaaataggaatttaattaaaaaagattattttgctaaaataaaagaattaaaaaaacataatcaacattattatgaaaaaagtaatccaaaaatatctgatgccgaatatgataaattaaaaaaagagataattgaatttgaaaaacaatatatttttttaaaaagtaaaagttctccatctttatcagttggatctaaaccatcaaaaaattttattaaatctaaacacagaatcaaaatgctttcgctttcaaatgcctttgattcggacgatcttaaaaactttgaaaaaaaaatatcaaattttctaaatttaaaaagtaaaagttctatagaatatagtgttgagccaaaagtagatggaatttcagcatcattaacttataaaaataataatttagttttaggattatcaagaggagatggaatagaaggagaaataattactgaaaatttaaaaactattaaagatattccaaaagaagttaaagataaaaatttcccaaaagatattgatataagaggagaagtatacataggaaaagaagattttgataaaataaaagatcgatttgcaaatcctagaaatgcagcatctggatcacttagacaaaaaaatccaaatgaaacaaaaaaaattccccttagatttattgcttatacatatggatttaacgctagaataaattttaaaaagcagtctgaatttttagatcttcttaaaatttggggttttaatacaaatatttataataaaattataattggtatagataatttagttaaaaaccatcaagaatttgaaaaaaaaagacatgatttagactttgatgtggatgggttggtatataagataaatgatttagacctacaaaagagattgggctttgttgctaatgctccgcaggtgggcaattgcacataa

SEQ ID NO: 319813 - DNA, 628 bp, Unknown
  Bacterial polypeptide expressing nucleotide sequence isolated from the Sargasso Sea
ttgaatcaaataattgataaaataaaatcaattcgtgatcaattaaataatcacaactatcaatattatatacttgatgctcctataatttcagatagcgaatatgatgttttatttaggaagcttcaagaactggaaacacgtcatcctgaattaattagtaatgattcacctacacaaagagttggagctaaaccattagaatcttttgggagtatagatcatagtattccaatgctttcattagacaatgcaatgaataaagatgaaactagtgctttttatgaaaggctacaaaaaggattaaaaacggatcaatctatagaaattgttgctgaacctaagctagatgggcttggagttgagttagtatacaaaaatggaatgctttcacatggatcaacaagaggtgatgggtttactggtgaggatatcactcttaatttgaggaccataccttctattccactatctttaagaacagaaaatagagatataattgaattactagaagttcgcggtgaagttttcattacaaaagcaggatttaatgaattaaataatgatcgattaaataacgatcttcctacatttgcaaatcccagaaatgcggcggcaggaagttgag

SEQ ID NO: 319814 - DNA, 2011 bp, Unknown
  Bacterial polypeptide expressing nucleotide sequence isolated from the Sargasso Sea
aatgaaagatattgaaataaaaaaatactataaaaaaaaaattaaagaactaaaaatacataataaatcatattttgacgatagctctccaaaaatttcagataaacaatatgatgacattaaaaaagagatacttaatttagaaaaaaattataattttttaaaaagtaacttttccccttcaaaatcgttgggatttacgccctcaaagaattttataaaatctagacatagagttaaaatgttatcattatcaaacgcttttgataaagaggacttactaaattttgaaaagaaaatatttaatttcctcaacaagagaattgatgttgaatatagtgttgaacctaaaatagatggaatttctgcctcattaacttataaaaatggaatattagtaatgggtacctcaagaggagatggtactacaggagaggtaattactgaaaatttaaaaaccattaaagatatacctcagaaaataacaaacaaagatttcccagaggatatagatgttagaggtgaggtctttatagaaaaagatgattttaacaaattaaaaaatgattttgccaatgctagaaatgcagcatcaggttctctaagacaaaaaaatccactagaaactaaaaaaattccacttcactttgtagcttatacttatggttattttgaaagtgataaaataaaaaaacagtctgattttttaagttcattgaaaaaatggggttttaaagtaaatgagcataataaggttttaaaaacaattaaagaattagaaagttttcacaaaaaatttgagaatgatagatttgatttaaagtatgatgttgatggtttagtctataaaatcaataatcttgatcttcaaaacagattaggatttacagcaaattctcctaggtgggctatagctcataaattttcagcagatagtgcatattccataataaaagacataaatattcaagttggtagaacaggtgcattaacaccagtagcaagaataaaacccgtaaatattgggggtgtaattgtttctaatgcaacacttcataatgaagatgaaataattagaaaagatataagacttggtgatactgtaaaagtagagagagcaggtgacgttattcctcatgttgtattagttgatctaaaaaaaagaaaaaaagattcaaaaaaatttgtatttccaaaaaaatgcccctgtggttttgatactataaaagaatttaataaagtaacaaaaaaatatgatgcagtgagaaggtgtccagatcgaggatttgaatgtgaaaaaatagctgtagaaaaaatcaaacattttatatcaaaagaagcacttaatattgacggtttagggaaaaaagtcgtggaaaatttttggaatctaaaattaataagatatccacaagatatttttaaccttgattatgccaaaatttctaatttagaaggttggggtgatctctcagtctcaaacttaaaatattcaattgatcaatcaaaaaaagtttctttggataaatttttgtacgctatagggataaggcatattggaattgaaaacgctaaacttttagcagaatatacaaaatcaataattaatttcttaaacttaatcaaaaataaaaaatttaatgaatttttaaatattgatggaattggtggaactcaaataaattccctgaaaacattttttgaaaataagtctaattataaaataatcgaaaagttatcttctattttaaatatttctgatctcaaattaaataaagatggtaaacttttaaataatacatttatgttcactggaaaattatcaaatatgagtagagctgaagcaaaatctttaattgaggagaattcaggatctgttgtaagctcagtaaataaaaaattaaaatatttgataatcggagaaaagcctacaaatcgtaaagtacaacaggctagagaattaggaataaaagttttatctcaaaaagagtggcttaatttattaaattag

SEQ ID NO: 319815 - DNA, 1028 bp, Unknown
  Bacterial polypeptide expressing nucleotide sequence isolated from the Sargasso Sea
aatgtcaacaactgaagactttgaagctattaatgtagaggaattaacagagagccaggcgtctagggaaattatcattcttaaagagcagataagaaagcatgatatttcctaccatagcgatgatgctccaattatatctgattatgagtatgatagacttcgaattagaattacggcgatagtatccaggtttccaaatttaaaaggagaggatgatccatcactatatgtcggagctacctcagatattggttttagtaaaatcgttcatgaaaaatctatgttatcccttggaaatatattttctcgagaggaccttaatagttttatagacggaattagaagatttttggttgaattaagggacaatccagatttattagttgaaatagtggcagaaccaaaaatagatggtctttcaatttcattaaaatatgaaaacggtactctggtcactggagcaacaagaggaaatggaatagaaggagagaatgtaacaagaaatgttatggtaattgaccaggtgcctaaaaaactgttgggtgattttccagagttgttggaggttaggggcgaaatatatatgactaaaaatgatttcattgagttaaaccatcggcaatctgaaattaatgaaaaagtttttgccaatccgcgtaatgctgctgctggttcattaagacagctcgattggagagttaccagcaaaagacctctaagaatgtttgcttacgccgtccctgtatcttcaaagccagtagcggatagtcagtggggtttgcttgaaaggctaaaagaatggggctttgcggttaaccctttatcacaggtttgtgaatcggtaggaaaacttatgagttattatgaaaatataagttttcagcgtagtgggttagagtacgatattgatggcatcgtttacaaggtcaataggttagactggcaggagaggctgggctttcttagtcgcgcaccgcgatgggccgttgctcataaatttccgggagagcaggtcaggacaaaag

SEQ ID NO: 319816 - DNA, 2119 bp, Unknown
  Bacterial polypeptide expressing nucleotide sequence isolated from the Sargasso Sea
aatgaaaaaatcaaatgtttcggaaaatgataatcaatctaaattaaattctctttatgaacagataattgagcacaataaaaagtatcatcaagataataatccatccatatcagacgctgagtacgatgagctagtaagagaagcaatagaaattgaaaaagaatttcctgaatttaaacaaaccaattcacctacagatttagttggatcagcgcctttagagggttttgctaaaattcagcacaagattcctatgctatctatacaaaatgctaaaaatatagatgaggttaataattgggttgatggattaaagaattttttacttcttgaggataaagaagaaatagaatttattgctgaaccaaagattgatgggttatctgcaacacttatatatgacaaaggagaattaattttaggagcaactaggggtgacggagcttttggtgaagatgttacagataatttgagaacaataattgatattcctaaatctttaaataaaaatttagccccagatcgacttgaagtaagaggtgaagtttatataactcatgacgaatttaatgatcttaatgaaaaacaaaaaaaagacggtaaagatatatttaagaatcctagaaacgcagcggcaggatcattaaagcaattagacccaaaagaaacatcaaaaagaccattaagattttttgcatttagttggggtgttttttctgataataattttaatttacacagcgatataatgaattatttcaatgatttaggattaataactaatccagagtcgagtacacatatgtcagttaattctttagaaaaatattacaataatcttttagataaaagaatggatctaggttacgatattgatggtattgtatataaattaaacagaatagattggagggaaagacttcaatcgactggtcatcatcctcgatgggcaatagcgcataaatttccagctgagaaagctatttcagaaattatagatgttcaaatccaagttggaagaacaggtgttctaactcctgtggctagattgaagcctgtaaatatcgggggtgccttagtttcaaatgcaagtttgcataattatgaagatatcaaaaaaaaggatattcgaattggagatactgtatgggttcaaagagcgggagatgtaatacctcaagttattgaagttattaaatcaaaaagaaaaaaagaaaacaaagaaataaaagtacctaagaattgccctgtttgtaattcagatgcatatagagaaatattaactgaaaacaaaggagcaataacctatgaaaaatatattagatgtacaggaggctttacatgttcctcgcaagctaaggaaagactgaagcattttgtttctaaagagggtttcgatattgacggattaggggataagcaaattaatgactattttgatatggggattattaaagatccaactgatattttttctcttgaacaaacttataaaaaaaatcctcctcaaatatgggtttattcatctggttcaaaatctaaaattaacactattaaggatagcgcaattaaactttttaaagcgatcgatgataaaaaaaatatcaactttgatcgttttatttattcattaggaattaggcatttaggctcttctacggcatccttgctagccagtcattttattgcttttaataacatggtgtcagtttttaaattacataagcttgatgaaattgatgaggtaagatcacttgatggtattggcgataaagtagtaaatgccttaatagatttttttcaaaatagagaaactttaaatttagtaaatgacttaattaaaatgggagtaactattcaagattatgaaaaaattgagactgatagtattttatcaggaaaaagaattgttataactggaacattagaaagtatgagtagagctgaggctaaagttcgtattgagtctttaggaggtaaggttgtttcaagtatttcaaaaaatacgaattatcttattaccggagaaaaaccaacaaactctaagatagataaggcaaatagtcttgaagtaaaaataattaatgaaaacgaaatgtttaaactgcttcagtag

SEQ ID NO: 319817 - DNA, 710 bp, Unknown
  Bacterial polypeptide expressing nucleotide sequence isolated from the Sargasso Sea
aatgaatatttctgaaaaaattaaatctattagagaaaaaataaatgaacataattatcaatattatgttttagataatccaataatatctgatggtgaatatgataagttatttttagagctcgaatcgttagaaaaacaaaatcctgaatttgtaattccagagtctcccacgcaaagaattggtgcaacgccaattgaaagctttgggactgttacacatcgtattactatgatgtcactagcaaatgctatggatacaaatgaattaaaagcatttgataagagactcaaaaaaaaattaaaaactgatgatgaactagaatatgttattgagcctaagctagatgggctcgctgttgaattaatttatgagaatggaatatttgttaatggttctacgcgaggagatggaaatataggtgaagatatcacatctaacctaaagacaattaaagctatacctttaaaattaagggatgatagcacttcttcccccagattgcttgaagtaagaggcgaggtgtttattagaaaaaatgattttcaagacttaaacactaaacgattacaatctaatgaacagccttttgctaatccacgaaacgctgctgccggaagcttaagacaacttgatccaaaagttactgcaaaccgcgctttatcaatttattgctatcagtcaggtttggtagatggaattgatttta

SEQ ID NO: 319818 - DNA, 712 bp, Unknown
  Bacterial polypeptide expressing nucleotide sequence isolated from the Sargasso Sea
tttgtacaataagaaaattaaattattaaatcagttcaataaactttactatgatttaagcaaacccaaagtttcggatcaagagtatgataaattaaagaatgaaattgttttactagagaaagaatataagtttttaaaaagtacaaactcacctactcaaaaagtaggatttaaaccgtctaaaaattttaaaaaattaccacataaagtaccaatgttgtcattatcgaatgcatttagtgaggaagatctcaaaaattttgaaaaaaaaataattaactatttagataaaaaagatgaatttgaaatattttatagtgctgagccaaaaattgatggaatttcagcttcaattatttataagaatggtaaattcataactggtttgtctaggggagacggtaaagagggtgaagacataacggaaaacttaaaaaccataaaagatatccctaatgaaatcaattctaaaaattttccaaaggaaatagatataagaggtgaagtatttattaaaaatagtgaattcaaaaaattatctaataaatttgccaatccgagaaatgctgcctctggatctcttagacaaaaagatccaaatgaaacgaagaaaattccattaaattttattgcttacacttatggatatgagaaaggtttagaagttgaaactcaacatgagtttttagaaatgttgaaacactggggg

SEQ ID NO: 319819 - DNA, 1701 bp, Unknown
  Bacterial polypeptide expressing nucleotide sequence isolated from the Sargasso Sea
aaaaaattacggatgaaatgttgtttccaattgttatagagccaaaaatagatggactagctatctcattaatttacgagaatggcctctttgttcaaggattaactagaggagatggctttatcggagaggatgtaacacataacgttaaaactattaaaaatatacctttgaaattgaaaaaagaaacaaaaggaattttagaaataagaggcgaagtttatatgccaacggaaagttttaatatattgaatgacattaataaaaaagagaatttacccacattcataaattcaaggaatgctgcggcaggctctttgaggcaaaaagactctaatattacagctacacgtgatctaagactgttatcttatcagctgattaatcatgaagagattgacctttctttaaactattcaaaacaattaaataatcttaaaacatatggttttcaagttaataacttttatgaagtatcagatataagtgaaattacaaaaatattagatgaaatagaagccatgcgagataagtttagttatcagattgatggggcagtattgaaaatagattctgcaacttcacaagatcagttagggtttacatctaaagcaccgagatgggctattgcatataaatttcaagccgaagaacaaactacagtcttaaaagatattaaattacaaactggaagaacaggtgcaattacacctgtcgcagttttggagccaataaatgttggaggagcaaaagtttcttcagcaacgctacataatcctgatgagatacgaagaaaagatctaagaattaatgactatgtaattgtaagaagagctggtgacgtaattcctgaagttgtttcatcaataaaagaaagaagagatgggactcagaaaatgtggagcttaccaactagttgcccttgtggagattcaactattgaatttaacgaagaggaaaaagttccaagatgtaaagaaaaactatcttgcagtcttgctagaaaagagggaattatattttttggctcaagggctgggttggaaattgatggcttaggcaaggaaacaattgaaacattaatagaaaataatcttattaaaaaggttgaagacatttatgatttaaaatttgaggaattaatttctttacctcaatgggaagagaagaaaacaaataatctactaaaagctatatcaaaatccattaatactgatccagaaaaattattaacagctttaggaatcagacatataggaaaaagaactgccaagcagcttattcaaaatttcggatctatcaatggagtattagatgctactaaagataagattgaaacgattcatggcatttctgaaagtgttgctgactctttaactgagtggaaatcagataatgaaaacattaaaacaatgtcttctttagagaaacacggattcaaatttgataaaaaagcagcaacttctactggtaagttaaatggcaaaacttttgtaattaccggcactttagaaaattattctcgtcaggatctcatcaatttaattgaaagcttgggtggtattgtcactacttcagtatctaaaaatacagatattttgattgcaggaaaaaaatcaggtacaaaactggacaaagcaaaaaaattagaaatcaaaattatgaatgaggatgaagctttaaattatattaataagtaga

SEQ ID NO: 319820 - DNA, 1078 bp, Unknown
  Bacterial polypeptide expressing nucleotide sequence isolated from the Sargasso Sea
atggataaaaaaaaagtaaatgaaataattaataaattgtctaaggcggaacatgattattatgtcatgaataagccaacaatgtcagatgctgaatatgacaaattatataatcaattaaaaagcatagaagaagcaaacccagaattaattctttcctactcaccaacccaaagagttacagggacacctagtaatgcttttcaacaagtagaacaccggcaaagaatgtacagtcttgataattcagaaaatattaatgatattgaaaaatggcttgaaagacttgaaaaaattacagatgaaatgctttttccaattgttatagaaccaaaaatagatggactcgctatctcattaatttatgaggatggcttatttgttcaaggattaactagaggagatggctttatcggagaggatgtaactcataacgttaaaactattaaaaatatacctttgaaattaaaaaaggaagcaaaaggaattttagaaataagaggcgaagtttatatgccaacggaaagttttaatatattgaatgattttaataaaaaagaaaatatacccaagtttataaattcaaggaatgctgcagcaggttctttgaggcaaaaagactctaatattacggctacacgtgatctaagattgctatcttatcaactgattaatcatgaagagatagatctttctttaaactactcaaaacaattaaataatcttaaaaaatacggttttcaggttaataacttttatgaagtatcagatataaatgaaattaaaaaaatattagatgaaatagaaaccaaaagagataagtttagttatcagattgatggagcagtattgaaaatagattctgcaacttcacaagatcagttagggtttacatctaaagcaccaagatgggctattgcttataaatttcaagcggaagaacaaactactgtattaaaagatataaaactacaaactggaagaacaggggcaattacgccagttgctgtattagagcctgtaagtgttggaggagcaatggtatcatttgctaccttacataatcccgatgaaataa

SEQ ID NO: 319821 - DNA, 892 bp, Unknown
  Bacterial polypeptide expressing nucleotide sequence isolated from the Sargasso Sea
atggacaaagatctaaagttgataaaaaaaaattatttatcattaattcaagaactgaaaaaaaataataagttttattatgaaaaaagtgatccaaaaatttcagatatagagtatgacaaacttaaaattaaaatttttgatttagagaaagaatttaaatttttaaaaagcaaagattctccatctaatgcaataggatttaaaccatcaaaaaattttttaaaatataaacatagaacaaagatgctttccttgtcaaatgcatttgatcaaaaagatttattaaattttgaaaaaaaaatttctaattttttaaatttcaaagaaaataataatactgaatatagcgttgaaccaaaaatagatggaatttctgcttccttgacttataaaaattgcaatctagttttaggattatctagaggagatggtatcgagggagaaataattactgacaatttaaaaactattaaagatattcctaaaaaaataaattataaaaattttccgaaagatattgatattagaggagaagtttatattggaaaaaaagattttgaaaaaattaaagatcgttttgcaaatcctagaaatgcagcatcaggatcacttagacaaaaagatccaaatgaaacaaaaaaaattccattaagatttattgcttatacttatggatttattagtgatataaatattaaaaaacaatctgagttcttagatcttcttaaaaaatggggttttaacacaaataaacataatgatgttattagtggtgtagataatttggtcaaaaatcataaagagtttgaaaaaaaaagatatgatttagattttgatgtagatggattggtttataaaataaataatgtagatatcaaaaaagattagg

SEQ ID NO: 319822 - DNA, 1250 bp, Unknown
  Bacterial polypeptide expressing nucleotide sequence isolated from the Sargasso Sea
aatttcagatagagactatgatgagttaaaaaaaaagatactagaatttgaaagtaaatatgtttatttaaataaaaaagattcaccatcaaaaaatattggttttaaaccttcaaaaattttccaaaaacaaaaacataaagtggcaatgttatctctttcaaatatatttaacaaaaatgatataattaattttgaaaaaaaaataaaaaattatttaaatttaagttcctttaaattttttgagtacagcattgaaccaaaaatagatggaatatcggcatctttaacatataaaaatggaaaattaactaccggcttatctagaggagatggatatgaaggagaagtaattacagaaaatcttaaaacaattagtgatattcctaaacatataaactctaaagattttccttcagaaatagaaattagaggagaagtttatattgaaaaaaatgactttgagttattgaaagataaatttgcgaatccaagaaacgcagcatccggctcattaagacaaaaaaacccatctgaaacaaaaaaaataccattaaaatttattgcgtatacatttggcttatttgaaaaaaataaatttattaaacagtctgattttttaaaatcattgaaagcttggggttttaaaactagtagatacaataaaattatctcgaatatagatgatatcattaaaaatcatcaaaattttgaaaagaaaaggtatgaattagaatatgatgttgatggattggtttataaaattaatgatctcaaacttcaaaatagactaggatttgtaggtaatgctcctaggtgggcagctgcccataaattttctgcagcctcttctttttcaaaaatattaaaaattgaaattcaactgggaagaactggcgcattaactccagttgcaaaagtagaacctgttaatattggtggagtagttgtttcaaatgcaactttgcataatgaagacgaaattaataaaaaggatattagaataggagatatagtaaaaatagaaagagctggtgatgttattccgcatgtaatatctgtggatttttctaaaagaccacccaaatcatttaaatataaatttccagaaaattgtccttcttgtggttcaaaagttgaaaaagaatttaacaagcagactaaaaaatatgatgctgttaaaaggtgctcatctgaaggttttacatgcgaaaaaattgctatagaaaagattaaacacttgttcaaaa

SEQ ID NO: 319823 - DNA, 1981 bp, Unknown
  Bacterial polypeptide expressing nucleotide sequence isolated from the Sargasso Sea
atgacagaattccagcctaaaaaacgcgtcatagatttgagcggtcaactccaacgctccagacaagcctactactgcggcaacacacatattaaagatgaagcatatgatcagcttaaagaagagttacaaaaactggaatttgaatttcctgaactgatccttgacgactctccgttgatccgggtccaggcgaaaccccaggaatcatttcctacccggactcaccgaagcccaatgttaagcctcggcaatgtttattcgatggaagaactgagggactgggaaacaggtctgcaaaaactcctcaacgatgaaaaaactgaatatgtttgtgaactgaaaatcgatggactggctctttccatcctttatgaaaaaggtgaactccaggcaggagtaactcgtggagacggaagccagggggacgaaatcactccaaacctgaagacactttccaaactcccactgaagttggaaagcccgcatgatcttgaagtccggggagaggtttacctgtcaaaaaaacatttttcacaactgaatcaacgaagacaacttactcaggaacccgaatttaaaaatccaagaaatgctgctgcaggttctgtgagaatgttagacagcaatgaagttcggcgaagaaaattggacctttttgtttacttgcttgcggatggtccattgaaaccgaagcattcggaaaacctacagctactgaaggatctgcaattccccgtcaatcctgaaaccaaaacctgtaaaaacatcgatgaagtcattgaattctgcaggtattgggaacttcataaagacgaactgccttacgagatagacggggtggtggtcaaagtcgatgatatacagctccaacaaaaactaggttttacagcaaaatctccacgctgggcaactgcagtaaaattttctgctgaacaggcattttcgatcattcgttcccttgagatcggagtcggtcgaagcggggtgctcacacctgtggccttggtagatcccgtagaactaaacggaaccatcgtttcccgtgcgaccctccacaactatgatcaggtaaatcggctcaacttgcatcttggggatcgagtcattctggaaaaagggggggagatcattcccaaaatcgttaaatctgaacgaggtccggcaaaaggatggcctattcgctatcctgaaagctgtccggtctgcgattcacaagtctcccaattaccgggagaagttgactggcactgcacgaatatggactgtcctgcccaactcaatgagcgattgcttcattttgtatcacgaaaagcgatgaacatagacaccgtgggaccggcattgattgaacaacttacttttaaaaagaagctacgcaatcctgcagacctatatcgtcttcatatctccgatctggaaaaacttgaacgaatggggaccaaatctgcggagaatgtgctgaatgccatcgaatattctaaagactgcaagttgggacaatttatccatgccctgggaatcccccatgtcggcgaaaaaacagcatcggttttggcgaataagcatggttcccttcaaaccctgatgcaatgcactccagaaacactcgaggaaatcgacgaaatcggacccatcattgctaaaagtgtgttttatttttttcaagaccaaaataatctggactggatcagagatcttttggaacttggagtcataccccgaaatcaggaagctttagaaggttccgggattcctttttttgaaggcaaggtgttcgtcattaccgggaccctctccgaggcccgagaagtctggaaagaaaggattgaagccgcaggcgcaaaagtgacaggaagtgtttccagcaaaaccgatttcctccttgcaggagaaaatgcaggatccaaactggaaaaagcaagaaccctcggagttcaagtcttggatgaaatcgaggtttccaaggaacttggttgaa

SEQ ID NO: 319824 - DNA, 790 bp, Unknown
  Bacterial polypeptide expressing nucleotide sequence isolated from the Sargasso Sea
atgaaacgactgattgatgaaataaattttcataattaccaataccatgggatggatgatccaaaaatatcagactatcagtttgataaattagtcattgaacttttggatttagagaaagagaatccgcaacttatacaagtagattcaccaacccaaaggattggctcaagacccatagatggttttactcaaattgatcatctaaccccgatgctctcactagacaatgtattcaccatggaagaattaatgtctttcgaaatgagggccaaagataaattatctttagaagatagaattgagtttatcgctgaaccaaaactagatggtgttgcagtcaatttagtatatgaatcaggaatattatcttatgcaacaactagaggggatggaacaacaggtgaagatgttactcacaatgttcttacaataaaatcaattccgatgaagctgaaatcatcatcgccacccaaaacaatagaaatacgtggtgaaataattatttcaaagaacgatttcgagacaatgaacagagagaatgcaggaaaagagttgaaggtatttgcaaatcccagaaatgctgcggctggaagcattcggcaactagacccaaacatttcaaaagatagaccattgagattttatgctcatggatatggtttactatccaatgaggataaattctcttcacattatgacgtcatgaattacctaaatgactcaggaattgtcatctctccttactcagaagttgtaactggcgctgaggaatgcgggagatattatg

SEQ ID NO: 319825 - DNA, 1525 bp, Unknown
  Bacterial polypeptide expressing nucleotide sequence isolated from the Sargasso Sea
atcaatgctattccattgcagctaagaaaatctgtaaaaacccccacttttatggaaattagaggtgaaatttttatgaacatctcagatttcaacaaattaaataaatctcgagaattattaggagagaaactctttgcaaatgctaggaatgcagcagctggaagcgtaagacaactcgatcctaaaattactgcctcaagaaatctctcaattttttgttacgaaattggaggtagtgaagatattgagtttaataatcaagttgaaatgcttgactatttaaagtcaattggactacctgtaaatccgttatccaaaaaaattacgtcagctagtgaaatgatagcatatcatcacacccttgaatcaaatcgtaaccatatagattatgaaattgatggctctgtcataaaagtaaataattacaaaagaagagagcgattggggttaagatcacgttctccaagatgggctatcgcagcaaaatttaaagcaaagcaagcagaatcacagatcataggaattgatttgcaagtcggtagaacaggagttgttactccagtagcaaaaattaaagaagtcgaattgtcaggtgttatgatatccagtgctactcttcataatcaagatgaaattgatagaaaagatattagaattaatgattttgtattaatcgaaaggtctggcgatgtaattcctaagattacgcaggttctaaaaaataaaagacctcaaaatacacaaaaattctcaattagtgattataaatggcctgatcctgactgtaaaatcgaacgcattgaaggagaagcagcatatagatgtataaatccaaattgtaaatcaagagttatgggtatacttgaacatttttgttcaaagaatgcaatgaacattgaaggtatgggtccccaaattgttaaacaattatttgaagcagatttattaaatagttttgatgatatttacaaaataaaatatgaagatttaattaacttagatcgttttaagaataaatctgcaatgaatttaattgattcaataaatcaatctaaaaaaacaacttttcctagatttttatttggacttggtatcccaaatgtaggtcaacatatatccaagataatagataaatactgtaattcatctttagaaaaattaactgaattaacagttgaagaaatggtagagatagatggaattggtgaaacagttgctatagctatacaagactattttaacgacaataacaataaaaatattgttgaaagttgtcttcaattaggtattgagataatacctactacttatgatacctcaaaaatgacgatgttgaatcataaagtcgttataactggatcttttgaaagtttgtcacgtagcgatctaaagcttcgattagaaaagttaggagctacagttaactcttctgtttcttcaaaaactagtgttgttattgttggaaaaaatccaggatcaaaattatcaaaagcacaagatttaagtattaagatttgttgaa

SEQ ID NO: 319826 - DNA, 1664 bp, Unknown
  Bacterial polypeptide expressing nucleotide sequence isolated from the Sargasso Sea
cgtgtcgctacgttacgtcgacggcgtgttcgtccaggcgtccacgcgcggcgacggcacgaccggcgagaatgttacccagaacatccgcacgatccgctccattccgctcaagctcaaaggcaagcgcatcccgcacgtgctcgacgtgcgtggcgaagtactcatgttcaagcgcgatttcgaacgtctgaacgagcgccagcgggctgcgcagcaaaaggagttcgccaatccgcgtaacgctgccgccggcagcttgcggcagctcgattcgaagatcaccgcgcagcggccgctgtcgttttttgcttatggaatcggtgtgctcgaaggattcgagatgccggacacccatagcgaactgctcgattggtacaaggaactcggcttgccggtgaatggcgagcgggccgttgtgcaaggcgccgaaggtttgctgaagttcttccagtcggtgggcgagaagcgcgacgcgctgccttacgatatcgatggcgtcgtgtacaaggtcaaccggcgcgatgaacaggacgtgctcggcttcgtgtcgcgggcgccccgtttcgccctggctcacaaatttcctgcccaggaagcgctgaccacactcctcgcgatcgacgtgcaggtcggccgtaccggcgcgattacgccggttgcgcggctggaaccggtgtttgtcggcggcgcgacggtaacgaacgccaccttgcacaatgaagatgaagtgcgccgcaaggatattcgcatcggcgacacggtcatcgtgcggcgggccggcgacgtgattcccgaggtggtgggtgcgctgctcgaccgccgcccggacgacgcccgcgagtttgtcatgcccacccattgcccggtgtgcggttcgagcatcgaacggctgccggacgagacgattgcgcgctgtacgggcggcttgttctgtccggcgcagcgcaaacaggccttgtggcattttgcgcagcggcgcgcgctggatatcgacgggctcggtgaaaagatcatcgatcaacttgtcgagcaaaatctggtgcggacgccggccgatctgttcaaccttggctttgcgacgcttgccgaactcgaccgcttcgccgaaaagtccgcgcagaatctgctcgactcgcttgagaaagccaagcacaccacgctggcgcgctttatttacgcactcggtatccgccatgtgggcgaatcgacggcgaaagatctggccaaacatttcggttcgctgacgccgatcatggatgcctcggtcgaagaattgctcgaggtgaacgacgtgggccctgtggtggccgagtcgattcatcggttctttgccgaagaacacaaccgcacggtgatcgagcaactccgcgcgccgggcaaggtcacatggccggaaggaccgcccgcacccaaggcgccgcaaggcgtgctggccggcaagacggttgtattgaccggtaccttgcccacgctcgctcgcgaagaggcgaaagaaatgctcgaagcggccggcgcgaaggtggccggctcggtgtcgaagaaaacggactacgtggtggcgggggccgaagcgggcagcaaattggcgaaagccgaggaactcggtatcccggtactcgacgaagatggtatgcgcaagctcctggaggggcagttatgat

SEQ ID NO: 319827 - DNA, 2017 bp, Unknown
  Bacterial polypeptide expressing nucleotide sequence isolated from the Sargasso Sea
atggaaaaaacgattaaaaaaagaatagatagcttaatcgcagaaattaataatcataactatgcatattatgttttagatgatccaaaattaacagatattgaatatgatgcgttatttcgtgagcttgaaaccctagaaagggataaccctaacctaatttctaaaatatctccaactcaaagagttggccatccagtaacaagtggtttcaaaagttatgaacattcaattcctatgctttctctatcaaatgcaattaatgatgaggaaattaatgattttcataaacgtatagtaaaatggttaaataattcagaggttaactttgtagcagagcctaaaattgatggtttgggtgtgtcattaatatatgaaaatggattactaaaaagagcattaactagaggagatggttttaaaggcgaggatattacgcataatgttaaaactataaatgctgtcccattggaattaaggcaatcaaaaaagaaaacaccatcttttattgaagttaggggtgaaatttttatgaatatttcagactttaatcaattaaacaaaaatcgcgaaatatcagatgaaaaaatctttgccaatgctagaaatgcagcggcaggcagtgtaagacagcttgatccaaatattacagcttctagaaatctttcaattttttgttatgaaattggcggaagcaaagatattaagctagataatcaaattgaaatgcttgaatatcttaaatctgttggattaccagttaatcctttatctaaaaaaattacttcttcagaggatatggtttcttatcatcatactctagagactaatcgaacgcatattgattatgaaattgatggttcggtgataaaagtgaataattaccaaaaaagagaaaggttaggattaagatcacgttccccaagatgggctattgcggcaaaatttaaagcaaaacaagcagagtcccagataataggtattgacttacaagttggtagaacgggagttattacgccggttgcaaaaataaaagaagttgatttatctggtgttatgatttctagcgctactcttcataatcaagatgaaattgataggaaagatataagaattaacgattttgtattaattgaaagatcaggggacgtaattcctaaaattactaaagtcttgaaggaaaaaagacctaaaaatacgaaaaaattttcaattagtgattttaattggcctgatccggaatgtaaaatcgagcgcgttgatggagaagcagcttatagatgtaccaacccaaattgtaaatcaagagtaatgggtgtccttgaacatttttgttcaaagaatgcaatgaatattgaaggaatgggacctcaaatcgttaaacagttgttggaagcagacttattaataagttttgatgatatatataaaattaaatacgaagatttaattgaattagatcgttttaaaaataaatctgccatgaatcttatcgattcaattaatcagtctaaaaagacaacatttccaagatttttatttggacttggaatccctaatgtgggacaacacatatcaaaggtaatagatagatactgtaattcatctctagaaaaattgaccgagttaaagattgaagaaatgaaagaaatagatggaattggtgaaacggtcgctatagccatggaagattattttaaaaatgataataataaaagtatcattgaaagttgtttaaagttaggtgttaagattatacctaccacttatgatactagtagaatgagaatgctaaatcaaaaaatagttataacaggatctttcgaaagtttatcgcgaagcgatcttaagcttaggttggaaaatttaggagctaccgttacttcttcagtttcttctaaaactgacgcagttatagttggtaaaaatccaggatcaaaattatcaaaagctcaggatctaaatattaggattgtagaagaaaaagatttgatcggatttctaggtgaagcttagc

SEQ ID NO: 319828 - DNA, 1195 bp, Unknown
  Bacterial polypeptide expressing nucleotide sequence isolated from the Sargasso Sea
aataatctagaaaaaattagagaaaaactagaatatgaaatagatggaactgttttcaaaataaacaattataacgaacgaatgaaagtaggttcaagaagccgttcaccaagatgggcaattgcagggaaatttaaagcgcaacaggcaactagtattataacagatattattatccaggttggaagaacgggagcgcttacaccggtagcaagagttaagccagtttttgtttctggtgtcacagtatctaatgttacattgcataaccaagatgaaattgacagaaaagatattaggttaggtgataaagtgctaattgaaagatcgggagatgtaataccaaaaattattaaggtaatagaaagagaaaatcaaaatagtttaaaatttaaaatagataatatttgtccatcatgcgggcaaaagactaggaaacaaaacgatgaagcaataatacgatgtaataatttttactgcccttcccaggtgctcgggagaatacagcactattgctcaaagcttgcaatgaacattgagggcttaggagagaaaattgttgaacagttaattgaaaacaagctggtaaaaaatattgacgatctttatttgatcaaaaaaaatgaaatttcaaaactcgatgggcttggtgagaggtcagcaaagaatatcattgattccataaataactctaaagaaacaactttctcaaaatttgtgtatgctttaggaataagaaatgtcggggagcatacctcaaaattactagagaaaaaatttaaaggggatatggaacggttcaaaaatgctacggaaatagggctcttagaagtagacgagataggagagatagtagcacggtcaattgtcagtttttggaaggatgaaaagaattctactatggtacaaaactgtttggacagaggtgtaattataaatagaccaatagattcattatcaaataagtttagtgataaagtttttgttttcaccggggctctaagtatgatgagcagaaaagatgctaaggctttagttgaagaatctggcggacaaacaaaaaattccatcacaaagaaaaccacataccttgtggctggtgaaaattcaggatcaaaattggataaagccaaagagttaggtatatctatactatcagaaaaagattttatagatttaattggaaataaataat

SEQ ID NO: 319829 - DNA, 706 bp, Unknown
  Bacterial polypeptide expressing nucleotide sequence isolated from the Sargasso Sea
ttaaaacgtcttgtaaatattaatgattttgagtacttctgtgagcccaagatggatggagcagcagtatcactaatttacaaaaatggcatactagaaagggcagtaacaaggggagatggcagggttggtgaggatatctcccaaaatgttaagacgattagatcaatacctcaaaaactatcatcttctgaagcaaacattccctctttattggtaataaggggagagatttttatttcaaaagatgctttcgaaaaaatgaatgagagggctaaggaaaataatgaaaagctatttgctaatcctagaaatgctgcttcaggatctcttcgacaacttgattcaaagattacttcaagcaggcctttgtcttttattgctcatggattaggtgagtgcgaaggaatccaattttcttcaatatctgaattttatgatcatttaaaagcatggaaaatacctacaagtgatttatgtaagaaggttgaaactaaagatgattgcttaaaatttcatgacaaaattcttaaagaaagagaatctattccctatgagattgacggcgtcgtttttaaagttaatgactatgatcttcaaaaaagacttggttttatatcaagagcgcctcgatgggctatagctcataagtttcctgcagagggggcaacaacaattttagaagatatgaattccaagtggaaga

SEQ ID NO: 319830 - DNA, 831 bp, Unknown
  Bacterial polypeptide expressing nucleotide sequence isolated from the Sargasso Sea
atgaaagaataaaaaaatttttaaattataaacataatgagaaactagaatatttatgtgaacctaaaattgatggattatctcttaacctaacttattcagacggtaaattacattctgcggctactcgaggtgatggtaatgagggggaggatgttacagataatatcttaaatataaaaaatataccaaataaattaaaaaataatttccctaatataattgagataaggggtgaaatttatttaacaaaatcagattttgaaaatcttaataaaaaattagatcaaaaaaatcagtttgctaatccaagaaatgcagctgctggcagtttaagacagctagatactagaataagtcattctaggcccttaaaatttcttgctcatggtttgggattgtgttcaaatcaatataatacattaaatgattattacaatgatttgaataaatgggaaatatttcctaaccctattagaaaaaaagttaattcagttcaatctattatgaaatattataatgaaataaacgatttaagaagtaatcttgattatgatattgatggacttgttatcaagttgaataaaatacagaatcaaataagattaggagttgtaggaaaaaatccaaggtggtctatagcattaaaattttcagcagaaactgctagaactgttatcaattctatagattttcaagtaggtagaactggtgcaatcactcctgttgctagattaaataaagttaatcttggcggagtattaatttctaatgctactttacataattttgatgaaataaataaaaaagatataggtgtggagacttagt

SEQ ID NO: 319831 - DNA, 790 bp, Unknown
  Bacterial polypeptide expressing nucleotide sequence isolated from the Sargasso Sea
ttctttattcaaagaattaattgactttgaaaataataatgattttctgaatactgagaactcacctacccaaagaattggtttttctccattagatgaattccagaaatattctcacagaaagaaaatgctatctttggataatgctttttctattaatgatcttactgatttcaataaaagaataaacccaaaagaaaaattcaataaccttaaattttcttgtgaaccaaaaatggatggcgttgccatctcaataagatacaaggatggcctttttcactctgctgggacaagaggagacggaagcattggagaagacgtaactcaaaacgtaaaaactatccaaggaattccgcttaaacttgaaagtttttctactaaagatccaaaagactttgatgttagaggagaaatctacatggaactttcttcttttaatgagctaaataaacaactggcagaaaaaaaattcgcaaacccaagaaacgctgcagcagggagcttaagacaattagattcaaaaatcgttgctagaagacctttaaaaatgattgctcatggcataggttttgtatcagatgaatcttactttgagtctcattcatctatgattcaacaatttaaaaaatggggcttgcctaccaatgatcttgtcaaagaattctcttcagtaaatgattgcgaatcatatttcaatgaaatttccctgctaagagatagtttggattatgaaatcgatggcatggtcatcaaaattgatgacttaaaaattcaggaggaagtaggc

SEQ ID NO: 319832 - DNA, 861 bp, Unknown
  Bacterial polypeptide expressing nucleotide sequence isolated from the Sargasso Sea
aaaaagtgcgaaggtttttgctaaccctcgaaatgcggcggcaggaagtttgcggcaattagactctaaaattaccgctaaacgcccgctaatgttttactcgtactcactaggcgtggttgagccggagtcgtttgacctacctaatacgcacagtgagcgcctcaataagcttgcctcttggggcctgcctttgtgccctgatatcggtactgctgagggcggaaccggttgtttagattactacaatcttatcttaaacaaacgggatgcacttccttatgacatcgacggtgttgtgttcaaggttgatgatatctccattcaacgcaccctaggttttgtcgctagagcaccgcgctgggctattgctcaaaaattcccggcccaggaagaggtgactacattagtagatgtagaattccaagtggggcgtactggcgcgataacgcctgtggctagactcgagcctgtttttgtaggcggtgtaacggtatcgaacgcaacgctccacaatcaagatgaaatagagcgcttgggcgtaaaaattggcgatactgtggtgataagacgggctggcgacgttattcctcaagtggtgtctgtggtagaggctaaccgcactggtaatgaggtagatattaattttccagcccaatgcccggtgtgtgactcgaaggctgagaaattagaagacgaagctgttgcgcgctgcacaggagggctaatttgcccagcccagcgtaagcaggcactcaagcatttcgcttctcgtaaggcgtttgatattgacggtttaggcgataagcttgttgatcagcttgtcgatgctgatttagtgcatagtccagccgatttctt

SEQ ID NO: 319833 - DNA, 910 bp, Unknown
  Bacterial polypeptide expressing nucleotide sequence isolated from the Sargasso Sea
gcctcttccccgtctatctctttaggttttaccccttctaaaaattttataaaatctaaacacagagttaaaatgctgtctttatcaaatgcttttgatactgaggacttagaaaattttgagaagaaaatatttaattacttaaataaaaaaattgaactcgagtacagtgtagaaccaaaaatagatggaatttcagcttcattaacttacaaaaatggttcgttgattatgggtacatctaggggtgatggaacaactggcgaggtaataaccgaaaatttaaaaactattaaagatataccccagaaaataacttctaaggattttccgaaagatatagatataaggggtgaagtttttattaaaagaagtgaatttgacaaattaaaaaatgattttgcaaatcctagaaatgcagcttcaggatccttaagacaaaaaaatccaaatgagactaaaaaaatcccacttaattttgtcgcttatacttacggttattttgaaagtgacaaaatacgaaaacaatcagattttttaaactccttacaaagatggggttttaagacaaatgaacacaataaaattctaagcagtatagatgatttaagaaattttcataaaaaatttgaaaaagaaagatttaatttagaatacgatgttgatggtttagtttataaaataaatagtctcgaacttcaaaaaagattaggatttacagcaaattctccaagatgggcaattgctcataaattttctgcagatagcgcattttctaaaataatagacataaatattcaggtcggcagaacaggtgctttaacacctgtagcaagaataaaaccagtaaatattggtggtgtagtagtttctaatgcaacactccacaatgaagatgaaattatagaaa

SEQ ID NO: 319834 - DNA, 751 bp, Unknown
  Bacterial polypeptide expressing nucleotide sequence isolated from the Sargasso Sea
atgaaagatagtccgaagatcaaagaaagggtactggaactccataaacttataaatctccattctcataactaccattccttggatgaaccttctattgaagatcatcaatatgatgctctgtttaatgagctactcgatttggaagccaaatttccaaaatatcaattttcttattctccttcccaaagagtcggcggcaagcctcttgatggttttaagaaaatagaacacttgactcctatgctttctttagacaatgcatttaatgatgatgatatggaagactttaataaacgcatcctggagaggctacttgtcaaaggcaacataagcttttcatgcgaacctaagttagacggaattgcagtaaatctgttatataaaagcggtcacctagatatagctagcactagaggagatggaaaagttggtgaagatatcactcataatataagaaccatcaattcaatacctctctcacttataggtgatagttctgacctgccaagcctaatagagataaggggagaagtttttatcgaaaaaaaggattttgatttagcaaataaaaaagcaatcaaagaaggagaaaaaacttttgccaatcctagaaatgctgcggctggtagtcttcgccaattggatccatctattgctgcttcaaggcctttgaaattttacgctcatggtattggttacattaaggaaggaaactttaaactgcctgactctcaatccgagatgtaaa

SEQ ID NO: 319835 - DNA, 951 bp, Unknown
  Bacterial polypeptide expressing nucleotide sequence isolated from the Sargasso Sea
acaaatctttaatagctcgatccaaacaaagtatttttgtgaaccgaagatagatggagcagctgtctcactaacttatcttaatggcaatcttgagattggagccacaagaggtgatggagagaccggtgaaaatataacctccaatgttagaacgataaattcaattccattgaaattaattgggttaaaagatattccagagattctcgaagttaggggtgaaatatttatgcccaaagatgaattcacaagattaaataaactccaagaaaaagaaggtaataaattattctctaatccaagaaatgctgcatcgggaagcttacgacagctagatcctcagataactaaaagtagaccacttcatttttttgctcacggagtaggaatgattaaagggatttcattttccagtcaagaggaagtatttaaaaaatttgaaagctggggacttccagttaatccgttaaatataattgccgatgatcttgaagactgtataaagtattttgaaaaaattgataaaaatcgtgaatcactaaattatgaaatagatggagtggtctataaagtaaataacatcgatgatcagaataagattggtgaaattgcaagatctccaagatgggcaattgctcgaaaattcccagctgaggaggtccaaacaaaaattattgatataaatttccaagtaggtcgcactggggtcatcaccccagtcgcaaaacttgaaaaagtttttgttggaggagttaatgtaagtaattgcacgttacacaatgttgatgagctcgaacgccttgatcccagacctggggacactgttattataaagcgagctggcgacgtgattcctccaattatcagagtgattgcaaaagataaaaatagggcatcaaaagtaaaaattccaaaactatgcgagtgcggctcagaagtcagcttaaa

SEQ ID NO: 319836 - DNA, 892 bp, Unknown
  Bacterial polypeptide expressing nucleotide sequence isolated from the Sargasso Sea
tgtaaactaaataaatattattatgaattaagtaagcctttagttaacgattatgaatatgatcaaattaaagcagatatattatttttagaaaaaaaatatgattttttagtaagtgctaattcaccctccaagatagtaggttttaaaccatctaaaacttttaaaaaagttttacacagagttcctatgctttcactttcaaatgcttttgatgaggaggatttagttaattttgaaaaaaaaatcaataatttcttagaccaaaaaagttcaaacgaattagagtatagtgcagaacctaagattgatggtatttctgcttccttaatttttaaaaagggaaaatttataatgggactttctagaggagatggcaatgaaggagaagatataacaaataatttaatgacaattgatgatattcctaaaaatatttcagccaaaaattttcctgatgaaatagatattcggggtgaagtatttattcaaaataatgattttgaaaatcttaaagacaagttcgccaatcctagaaatgctgcttctggatcactgaggcaaaaaaattctcaagatacaaagaaaattcctttaaggtttattgcttatacatttgggtatgtaaataatatggaaataaaaaatcaaagtgactacttacaacaattaagtgagtggggttttaaaacaaatccatttaacaaaactataaaaggtatcaaaaatttaatgaaaaattatcatgaaatagaaaaaaaaagaaatgaaatcaattttgacattgatggtatcgtatacaaaataaatagttttgatctgcagaaacgtttaggcaatgttgcaaattcacctcgttgggctattgcgcacaaattttctgctaataaag

SEQ ID NO: 319837 - DNA, 360 bp, Unknown
  Bacterial polypeptide expressing nucleotide sequence isolated from the Sargasso Sea
aatggctgaacaacagcagcgggccgcggaactgcggtccctgctcaaccgagcttcccacgcctattatgtcctcgatgccccggtcatggaggacacggtctacgaccggctctaccgggagctgcaacagctggagcaggcccatccgagcttgctcagtgctgacagtcccacccaacgggtgggaggccccccagcgacgggcttccacagcgtcgagcaccggatcccactgcaaagcctcgataacgcctttgatcagggggaattgaaggcctggcatcaacgcctgctcaagctgctggatcgctctgacgacagcgctttaccccttgtgggggaactcaagattgacgg

SEQ ID NO: 319838 - DNA, 831 bp, Unknown
  Bacterial polypeptide expressing nucleotide sequence isolated from the Sargasso Sea
aaaaattttccaagcttaaaagataacaattctccaactttaaaagttggatttaaaccatcgaaaaactttgttaaagcaaaacataaagttccaatgctttcattatctaacgcatttaatgaagaagatctaaaaaactttgaaaaaaaaattattaattttttagctttaaaaaaaagtggtgaacttgaatttagtgccgaaccaaaaattgatggaatatctgcttctttaatttataagaatggtatctttaaaagaggtctttcaagaggtgatggatttgaaggagaagacattactgaaaatttaaaaactataatagacatacccaaaaaaatatcttttgaaaactttccaatagaaattgatattcgtggagaagtgtttattacaaatagtgattttaagtctataagtgaaaagtttgccaatcctagaaatgcagcttcaggatctttaaggcaaaaaaatccagaagaaactaaaaaaatacctttaaaattcattgcttatacttttggatatacaagtaatttagaaactaaaaatcaatcagattttttaagcaacttaaaaaaatggggttttaaaataagcaagtttaacaaaacaattaaaggtattaataatttagttttatatcatgaagaatttgaaaaaaaacgatacaatatagactatgatgttgatggcattgtatacaaaataaataattttgatttacaaaaaagattaggttttgtagctaatgcaccaagatgggcaatagctcataagttttcagctgatagttcaatttcaaagattataaatatagacatacaa

SEQ ID NO: 319839 - DNA, 870 bp, Unknown
  Bacterial polypeptide expressing nucleotide sequence isolated from the Sargasso Sea
atcccacaaaacttaccaacgaaaattgaagtaattgacgtgcgtggtgaggtatatatggagcataaagattttgaaattttgaataaaaattatggctccttaggaaaaaagatatttgcaaacccaaggaatgcggccgctggaagtttgcgtcaattagacgccacaataacagccgaacgtccgcttaagtttttggcttacgcatggggagaactgacagaacctcttgatatctctcaatttggtgcaatcaaaaagttgaaaaatttagggtttaaaacaaattcccacacgaagctttgtaaaacaattgatgaagcgcttgctcattatgatgaactatcaaaaatacgttcagacctaggttatgatattgatggaattgtttataaagttgactcattaaaccttcaggagcgattaggttatcgttcaacaacaccccgctgggctattgctcataaattccctgctgaatattcatggacacgcttagaggctattgacatccaggttggaaggacaggtgcgctcagcccagttgcgcgcttgcagccggtaacagttggtggcgtggtagtctctaatgctaccttacacaaccaagactacatagagggtcgtgacagttctggaaaggaaattaggtcgggtaaagacattagaataaatgattgggtagaggtttacagagcgggtgatgttatcccgaaaatttctgatgtagatttaacaagaagacaagttgacagtttaccttatacctttcctgtaaattgtccagaatgcggttcaaaagctattcgagatgaaggtgatgccgttatccgttgcaccggtggtatagactgtcctgcgcaagca

SEQ ID NO: 319840 - DNA, 665 bp, Unknown
  Bacterial polypeptide expressing nucleotide sequence isolated from the Sargasso Sea
agtgattttgaaaaattaaaaaataattttgcaaatccaagaaatgctgcctctggttctttaagacaaaaagatcctaaagagacaaaaaaaatcccattaaaatttattgcttatacctttggttttgaaaaaggtttgagggcagtatcacaagatgagtatttgaaaaatttgaaagaatggggatttaaaacaaaccctttaaataaaactttagaaaaagtagaaaatttaatgatcaattataaagaaatcgaaaaaaaaaggagtgatattgattttgatattgatgggattgtttacaaagttaatgattttaacttacaaaaaaggttggggaatgttgcaaatgctccaagatgggcgattgctcacaaattttcagctaatagtggaatttcaaaaataaaaaatattgaaattcaaattggcagaactggtgctttaacaccagttgcaaaaatcgatcctgtaaatattggaggcgtagttgtttccaatgcaactttacataatgaggaagagatcaatagaaaagatatcagggtgggtgatacagttttaattgaaagagctggggatgttattcctcatgttatttctgtcgatcaaaagatgaggattaaggactcaaaaaaatttatttttcctcataaatgtcc

SEQ ID NO: 319841 - DNA, 729 bp, Unknown
  Bacterial polypeptide expressing nucleotide sequence isolated from the Sargasso Sea
cggggaggacattttggaaaatttaaagacgattaaaaatatacctaaaaaaatcgtatcggaaaaagtaccagatctattagaaattagatgtgaaatatttataggtaaaaaagattttactaatatcaaaggtaattttgctaatccaagaaatgctgcaggcggttctttaagacagaaaaattctagtgaaactgaaaaaatcccgctgaattactttgcctatgggtttggagctgtaaatcctatgatatttgaaactcaatcatcttttttaaataaaattagtgaatggaagtttaatgttaatccatattcaaaacttttaaataattttcaagaaattcaaaaacattatctaaatatagatagtattagatctactttagattatgatattgatggtctggtttttaaagtaaatgatatacgtttacaatcgagattaggaaatacttcaaactctccaaggtgggctattgcttataaattttcagcagaaaaagctattactaaaataaaggatatacaaattcaggttggtagaacaggagctattactcctgttgcaaaagtagatccagttaatgttggcggagtagtagtatcaaatgcaactttacataatgaagaagaaatagatagaaaagatgttcgtattggagatataattcaaattcaacgagctggggatgtcattcctcaagtagtatcggttgataattc

SEQ ID NO: 319842 - DNA, 835 bp, Unknown
  Bacterial polypeptide expressing nucleotide sequence isolated from the Sargasso Sea
ggtaaagaaggtgaggatataactgcaaatttatcgacaataaaagacattccaaaaaaaattttagacaaagattttcctaaagatattgatattagaggtgaggtatttattcaaaatagtgattttgagagtttaaaagaaaaatttgcaaatccaagaaatgctgcctccggttctttgaggcaaaaaaattctgaagatacaaaaaaaatacctttaaaatttatagcatacacctatggttttgagcagggtttaagacaaataaatcaatccgattatttgaaaaaattagatgaatggggttttaaaactaatccacttaataaaacaatttctggagtaaaaaatttaatacaaaattataatgatattgagcagcaaagagctaatttagattttgatatagatggcattgtttacaaaataaataattttgaattgcaaaaaagattaggaaatgttgccaatgccccaagatgggctatcgctcataaattttcctctgataaagcaatttctaaaattttagatattgatattcaaattggaagaacaggtgccctaacccctgtagcaaaaataaaacctataaatattggaggagtattagtttctaatgcaactttacacaatgaggatgagataaagagaaaagatattcgaattggtgacatagtaactgttgaaagagcaggagacgtaatcccacacattttatcagttgatttaaataaaagaccaaaaaaaagtgctaaatttatttttccaaacaaatgtccatcgtgtggctcaaaaacagaaaaagaatttaataaagttacaaaaaaaa

SEQ ID NO: 319843 - DNA, 853 bp, Unknown
  Bacterial polypeptide expressing nucleotide sequence isolated from the Sargasso Sea
attgaatatattctgcgaaccaaaaattgatggagtatcattaaatgttacttataaaaatggagatttattaacggcatctacaagaggtgatggtaaaactggagaaaatgttactaataatattaagaaaattttaaatattccaaaaaaattaaagaataactatcccaaattcatagaaataagaggggaagtatatttatcaaaaaaagattttagagatttaaataataatttagatcaaaaaacaaaatttgcaaatcctagaaatgccgctgcaggaagtttaagacagctagatccttcaataacttactcaaggcccttaaagtttattccacatggtgttggattttcatcaaaagcttatattcaactagaagaattttataaagacttaaaagaatggaatattatgccaaataatttaaccaaaaaatattcatcagttgatagtttaaaaaaatattgtgatgaaatagaaaaagcaagaagtactattgaatatgatatcgatggattagtttttaaagtaaataatattgaaaatcaaaataggcttggttttgttggaaaaaaccctagatgggcaattgcttacaaattatcatccaaaaaaactgttacaaaaattaaatctattgattttcaagtcggtagaactggagctataactcctgttgctagattagaagaagttaatttaggtggtgtaattatcacaaatgcaactcttcataattttgaagaaattataaaaaaaaatattagtataaatgatattgttgaaattcaaagagctggggatgttattcctaaagttaataaagtaattaaaaaatcaaaggat

SEQ ID NO: 319844 - DNA, 948 bp, Unknown
  Bacterial polypeptide expressing nucleotide sequence isolated from the Sargasso Sea
aaatttaaaaaagatttatctaggggagatggaagagaaggtgaagatataaccttaaatttgactacaataaaagatattccaaaaaaaattttagataaagatttcccaaaagatattgacataagaggtgaggtatttattcaaaatagtgattttgagaatttaaaagaaaagtttgcaaacccaaggaatgctgcctcaggttcattgagacaaaaaaatcctgaagatacaaaaaaaatacctctaaattttatagcttatacttttggatttgagcagggtttaaagcaaataaaacaatctgattacttaaaaaaactaggagaatggggttttaaaactaatccactcaataaaactatttctggtataaaaaatttaattcaaaattataatgaagttgaagaacaaagagcaaatttagattttgatatagacggtattgtttataaagttaatgactttgcattacaaaaaagattaggaaatgttgcgaatgctccaagatgggccatagctcataaattttcttcagataaagcaatttctgaaatactagatatagatattcaaattggaagaacaggtgcgctaacaccagtagctaaaataaaaccagttaatataggaggtgttatagtttctaatgccacattacataacgaagatgaaataaatcgaaaaaatattagaataggtgatacagcagtaatagagagagctggagatgtaatacctcatatactttcagtagataaaaaaaaaagatcgaaaaattcaaaaaaattttttttcccaaaaaattgtccatcatgtggatcagaaacaattaaagaatttaacaaagtaacaaaaaaagttgatgctgtaaggagatgttccagtgaaggctattattgtgataaaatatcaattgaaaaattaaaacatttgttcaaaaga

SEQ ID NO: 319845 - DNA, 859 bp, Unknown
  Bacterial polypeptide expressing nucleotide sequence isolated from the Sargasso Sea
tctggcccgtattcgccgtttcctgaacctgacggcgcacagcccggtcgaaatcgttggcgaacccaagatcgatggtctgtcgctgtcactgcgctatgaaaaccgtgaactggtcagtgctgcaacgcgtggcgacgggacagagggcgaagacgtcaccgccaatgtcgcccatatcaccgacatccccaaaatcctgcccgacgatgcaccggccgacgtcgttgaaatccgtggcgaggtttacatggcgcgttcggccttccagaagctgaatgaaacgcagtccgaaacaggtggtaaaacatttgccaatccgcgcaatgccgcagccgggtcgcttcgccagcttgacccgaccatcagtgccaaacgcccgctgcgtttctttgcctacagctttggcgaactgtccgaaagtcttgcgcagacgcattgggatttcatcagcaagatcaagggttggggctttgtcaccaatccccacacgacgcttttgcacaatactgacgagatcatggcgttttacgaggaactcggcaatcaacgggccgaactcgattacgacattgatggcattgtctataaggtcaacgacttcgaattgcagttgcggcttggctttgtcagccggtcaccgcgctgggcaattgcccataaattcccggccgaacaggcccgcacccgcgttaaggcgattgatatccaggttgggcgcactggcgcactaaccccggttgcgcggcttgaacccgtcacggttggcggcgttgtggtctcgaacgcgacccttcataaccgcgacgaaatcgaacggctcggcgtaagggtcaatgaccttgtcgtcattcagcgg

SEQ ID NO: 319846 - DNA, 669 bp, Unknown
  Bacterial polypeptide expressing nucleotide sequence isolated from the Sargasso Sea
ctaaattacaaaaatggtaatttaataaaaggtctttcaagaggggatggtgaggaaggtgaagatataactgaaaatttaaagaccattaaagatattccattaaatatttcacataaaaattttcctcaggaaatagatataagaggcgaagtgtttatagaaactaacgactttaaaaaaattgaaaatgattttgcaaatccaagaaatgcagcatctggatcgttaagacaaaaagatcctaaaaaaactgaattaattcctcttaaatttattgcttatacttttggttttaattcaaatctaagagaaagcaaacaaagcgattttataaaagatttagatagatggggttttaaaacttctgagctaaataaaacaattaaagggattaataatttagttaggtatcatgctgaaatagagaaaaaaagattcagtctaaactacgatattgatggaattgtatacaaggtaaatgactttagtttacaaaaaagattaggttttatggccaccgcccctagatgggctattgcacataaattttcagctaactattcagtaaccaagattgtaggtatcgatattcaggttggaagaactggtgccctaacaccagtcgctaaagtaaagccagttaacatcggtggtgtgatggtttcc

SEQ ID NO: 319847 - DNA, 771 bp, Unknown
  Bacterial polypeptide expressing nucleotide sequence isolated from the Sargasso Sea
gatgaaagatagtcctaagatcaaagaaagggtactcgaactccataaacttattaatctccattcttataactatcattccttggatgaaccttctattgaagattatcaatatgatgctctgtttagtgagctactcgatttggaagacaaatttccaaaatatcaattttctttttctccttcccaaagagtcggcggcaagcctcttgatggttttaagaaaatagaacacttgactcctatgctttctttagacaacgcatttaatgatgatgatatggaagactttaataaacgcatcctggagaggctacttgtcgaagccaacataagcttttcatgcgaacctaagttagatggaattgcagtaaatctgctatacaaaagcggtcacctagatatagctagcactagaggagatggaaaagttggcgaagatatcactcataatataagaaccatcaattcagtacctctctcacttataggtgatagttctgacctgccaactatgatagagataaggggagaagtttttatcgaaaaaaaggattttgatttagcaaataaaaaagcaatcaaagaaggagagaaaacttttgccaatccaagaaatgctgcggctggtagtcttcgacaactggacccttcaattgctgcttcaaggcctttaaaattttatgctcatggtattggcttcattgaggaaggaaactttaaacttcctgactctcaatcagagatgttaaaacaatatcaatcatgggg

SEQ ID NO: 319848 - DNA, 821 bp, Unknown
  Bacterial polypeptide expressing nucleotide sequence isolated from the Sargasso Sea
ccacctgataaaattgaaattagaggggaagtttttattactaaatcagattttcaaaaacttaataaaattaatagtggccaatttgcaaatccaagaaatgctgcggctggaagcttaagacaacttgactctgcagtgacttcaaaaagaccgttaaaatttatttctcatggatttggtcattttgaagagactgatcaagaaacttactatcaacaaatgaaagagtttaagaaatggggtattcctattagcccatatttagaaatttgcacagggattaaagatttagaacatatctattataatattaacaagaagcgggcagatattccatatgatatagatggccttgtttataaaattaataatttagatttacagagaagactaggaacagttggtaaggcaccgagatgggcaattgctcacaagtttgagtctgaatcagctgagacaacggttgaaagaatagatatacaaattggaagaacaggttcagtaacacctgttgctaggttaaagccagtgaatataggaggggttttagtatctaatgcaactctccataactttgatgaaatgcataaaaaagatattcgagaaggagataatattattgttgaaagagcaggagacgtaattcctcatgttattgaagtagtaaagactaaaaataaaaaaagaaataatacttataaggtgccaactaagtgtccagtttgcggatcgaaaatagtcattgatgaagatgaagttgttatacgttgttcaggaacgtatcaatgtgaagctcagattatcggtagattaaggca

SEQ ID NO: 319849 - DNA, 804 bp, Unknown
  Bacterial polypeptide expressing nucleotide sequence isolated from the Sargasso Sea
ctatgcacgggcatattatactgaaaataagcccttaattagtgatgccgaatacgatcaattatatcgacgtattacgatgtatgaaaatgacaaccccctactgatctcatcagagtcgcctactcaacgtattggagatcaagtcttagatacattttcatcctttcaacaccactccacccttccatcattaagcaatgttttcgatgaagaagagcttcaagcatggtgggaccgtatccaaaaaactgaaaaaaaccccgatcttgagtttacaattgaacctaaagttgatggcctggctatcgctattcattataaaaacggggttttagatattgcagcgacccgtggtgatggcaaaacaggagaagtcgttaccgctaacatcaaaaccatcaaaaacctccctcataaactaccaaaacccattaccattgaagtacgaggggaggtatttatgcgtaaaagccagtttgccacaatttcggatcaattcgcaaaccctcgtaatgcggcagcaggctccctccgacaactagacccagccattgctgcagaacgacaactcgatatttttatttatcaagggatttataatgacatccctactcattttgacatgatttctttcttaaaaacacttaatttacccgttattcctcatattcaaaaagtaacaggtgttcaagacctacaaaacacagccctctctctttattctcaacgagaagatctagattatgagattgatggtgctgtaatgaaagttaataatttttctgtacaaaaacaactcgg

SEQ ID NO: 319850 - DNA, 937 bp, Unknown
  Bacterial polypeptide expressing nucleotide sequence isolated from the Sargasso Sea
attgaaaaatatgacttgaaaaagattaaagaccgatttgctaatcctaggaatgcagcatcaggatctcttagacaaaaaaattcaagtgaaacaaaaaaaattccacttagatttatagcttattcatacggatttaataatgaaatcaattttaaaaaacaatctgaatttttacaacgtcttaaaaactggggttttaaaacaaataaatttaataaaattgttagcggtattgacaatttagttcgtgttcacaaagaattagaaaaaaaaagatatgatttagattttgatgtggatggattggtatacaaaattaacgatttagaacttcaaaatagattgggttttgtagcaaatgctccaagatgggcaatagctcataaattttctgccgatagttccttttcaaaaatattaaacatagatattcaaataggaagaactggagctttaacaccagttgccaaggttaagccagttaacataggaggtgttttagtttcaaatgcgactcttcataatgaagaagaaataaatagaaaagatattagagttggtgatacggttaaaattgagagagcaggagacgtaataccacatgtacttttagtagatttaaacaaaaggcccaaagattcaaaaaaatttttatttccacagaattgtccttcatgtggttctaaagttataaaagatttcaataaaatttcaaagaaatatgatgcggtcaaaagatgttccagcgaaggatataagtgcgaaaaaattgcaattgaaaaaatcaaacattttgtttcaaaggaggcatttaatatagagggactaggaaaaaaagttgttgaaaaattttggaatttaaaattaataaagttaccttacgacatatttaatttaaattataaaaaaattgaaaaattagatggatggggaa

SEQ ID NO: 319851 - DNA, 691 bp, Unknown
  Bacterial polypeptide expressing nucleotide sequence isolated from the Sargasso Sea
acgtgttggataatcccacagtgccggatagtgaaatacgaccgggcaatgcaagcgctattggccatggaagccactcatccacagtggataaccgccgactcacccagccagcgggttggtgataaacccttagatgcctttgagcaggttgaacatgcagtgcttatgctgtcattggataacgcttttaatggggaagaattacaggaatttgatcgtcgtctacgggagcgtcttcataaacaaactggtcgcgacttggacgccgaggtggtttatacctgtgaacctaaattagatggtatagctgttagcttaacctatattaatggcgtattagcagttggtgccactcgtggagatggtagcacaggggaaaatatcacccaaaatctacgtactttagatagtgtgccattaaaactaataggcactggttggccggaggttttggaagtgcggggtgaggcctatatgcctacggcaggctttgaagccttaaatgcccgtttaattgccgccggtgaaaaaacctatgtcaatccccgcaatacggcagccggaagtttgcgtcagttagatagccgtattacggcgactcgtccattggaattttgtgcatatagtcttggacaaacgtcggccagtgatagcttgccaaaacaacattttgatatgctgaccctaa

SEQ ID NO: 319852 - DNA, 847 bp, Unknown
  Bacterial polypeptide expressing nucleotide sequence isolated from the Sargasso Sea
acccagcgggtcggtggagcaccggcggcaggcttcagcagcgtggagcaccgcattggactactcagccttgataacggtttcaacccggaagaactgcaagcctgggatgaacggctggctcgccagctggaagacagcgaggagcagagcagagagtttgtctgcgagctcaaaatcgacggcaatgccctggccctgagctaccaagacggcttgctggtgcgtgccgccacccgcggcgatggacgccgcggagaggaaatcacgaccaatgtgcgcacgatccagagcgttccactgcgattacgcctggagaagccaccggcctgggtggaggtgcgcggcgaagcctttattcccgatgacacctttgctgccatcaacaccgagcgtgaaagtcgcggtgaggccctctttgccaatccccgcaatgcctgcgccggcaccctgcgccagctcgatcccaaggtggtggcctcgcggcgactcgatttcttcgcctacacccttcacttgccagcggaggtgaagggaccagccagtcagtgggagtcactgcagtggctggaatccgcgggctttcgcgtcaatccgcaccgtgagcgcgccagcggggcagcaggggtgatcgacttttaccagcgctgggaggaggagcgtcaccagctgccttacgccacggacggcgtggtcgtgaagcttgactcgctggagcaacagcaactggcgggattcacacaaaaagcaccgcgctgggcgatcgccctgaagtacgccgctgaggaggcgccaagccggctgctgaggttagtggcccaggttgggcgcaccggcaaggtgacgc

SEQ ID NO: 319853 - DNA, 883 bp, Unknown
  Bacterial polypeptide expressing nucleotide sequence isolated from the Sargasso Sea
gaaaaaggattaaatgttgaatatagtgcagagcctaaaattgatggaatatcagcatcattattttataaagacggaaaatttgtaactggcttatctagaggtgatggaaaagagggggaagatataacagaaaatttaaaaacaattaaagatataccacatgaattaaaatttaaaaattttcctaaggagttagatataaggggggaagtatttattcaaaatagtgattttagagatttaaaagataaatttgcaaatcctagaaatgctgcttctggttctttaagacaaaaagatcccaaggaaactcaaaagattcctcttaaatttattgcttatacttttggttatgagagaggattggaggtgtcctcacaagaagattttttaaaaaagttaaaggaatggggttttaaaacaaatcctttaaataaaaccattaaaacaataaaagatttaatgaaaaattataatgaaatcgaaaaaaaaagaggtcaaatagattttgatattgatggaattgtttataaggtaaataatttcacattgcaaaaaagattgggaaatgttgcaaatgctccgcgatgggctatcgcacataaattttctgctaacagtagtatttcaaaaattgaaaacattgaaattcaaattggtagaactggtgctttaacaccagtagcaaaaataagaccagttaatattggaggtgtggttgtttcaaatgcaactttacataatgaagaggaaataaaccgaaaagatataagaattggagatacagttttaattgaaagagcaggagatgttatacctcatgtaatttctgtagatttaaagttgagatctaaagattcaaaaaaatttaatttccgaa

SEQ ID NO: 319854 - DNA, 894 bp, Unknown
  Bacterial polypeptide expressing nucleotide sequence isolated from the Sargasso Sea
ttaaaaagtaaaaatacaaatcataagtttaatgttgattgtaagattgacggagtttccttatctttaatttataaaaataaaaatttatttaaagctatcactagaggtgatggactagttggagaagaaattactgataatgtaataggtataaaaggtatacctaaaattttaaattattgtaaatctgattttattgaaattagaggtgaggtattctttctaagaactgattttgaaaaattaaataatcaatttgaaaaaaaaaatcaattttcaaatcctagaaatgctgcctcgggatcacttcgtcaacttgatagtaaaattacaaaagatcgtcctttaagatttataccccatgggtatggtaaaatttcatatgaaaaagagtttttaaactttgaagaatttttaagtttttgtaaaaaaaataattttgatcaaacaggtttctcaaagagttatgataatttacaaaacttatataattatatacatgaaattgaaaaaaaaagattttcaattaattttgatattgatggaatggtaattaagttgagtgacttaaatttacaaagaatgctaggaaatactagtaaatttcctagatgggcaatagctgcaaaatttagttcacaagaagcattgacacaagttaaaaagatagaactacaaattggcaggactggtgccataacacccgttgcaagactcaaaccaattaatattggaggtgtaattgtatcgaatgcaactcttcataactttgatgaaataataagaaaagacataagaattaatgattttgtttgggttaaaagagctggagatgtaattccctatgtttctaaagtagataaacaaaaaagaaataaatctcacaaaaag

SEQ ID NO: 319855 - DNA, 884 bp, Unknown
  Bacterial polypeptide expressing nucleotide sequence isolated from the Sargasso Sea
tcattaacttatatcaataaaaaattagtttatggtgtttctagaggcgatggtaaagttggtgaagacattactaaaaatattaaaacaataaaagatattccactattaatcaaagatgtcaactttccaaatgaaatagaaattagaggtgaagtattcataaaaaaaaacgactttttgaaaatcaaagataattttgctaatccacgtaatgcggcttctgggtctttaagacaaaaagacgaaaaagagacaaaaaaaataccattaaaatttattgcttactcttatggtttctttaaagaaaataatttcaaaaatcagtctgattttcttaaagaattaaaaaaatggggttttaaaactaataaagataataaaatattaaacggaataaacgagttactgaattttcataaacaatttgaaaacaatagatataatttagattatgatgttgatggactagtttataaaattaatgacttaaatttacaaaatagacttggctatacatcaaatgcaccaaggtgggctatagcacataaattttcggcaaataatgcaaatacaaaaattttaagtattgatatacaagttggaagaacaggtgcgctgacacctgttgctaaagttgatcctgtaaatatcggtggtgttgtagtatctaatgccacattacataatgaagatgaaattatcaggaaagatataagaattggcgacatagtaaaaattgagagagcaggtgatgttatacctcatgtaattgaggtagataaaacaaaaagagaaaagaattctatatcttttacatttccaaataagtgtccatcttgtggatctgaagcaataaaagaattcaataaaataacaaaaaa

SEQ ID NO: 319856 - DNA, 880 bp, Unknown
  Bacterial polypeptide expressing nucleotide sequence isolated from the Sargasso Sea
tataatatttttaaaaaataaagattctccgtcccaatcagttggttttacaccatctagaaattttaaaaaggttgaacataaaattccaatgctttctttggggaatgcattcagtaaggacgatttggtaaattttgaaaaaaagattatcaattttttaagcttaaataaatctacagaaatagaatatagtgcagagccaaaaatcgatggtatttcagcttctttaatttataaaaataaaaagtttgctcaaggactttcaagaggaaatggtaaggaaggtgaagatataactgaaaatcttaaaacaattaatgatataccaaaggaaattttatctaaaaattttccgaacgaaatcgatattcgaggtgaaatttttataagaaatgatgattttaatattataaaagataaatttgcaaatccgagaaatgctgcctctggttctttgagacaaaaagatccaaaaattacaaaaaaaataccattaaaatttattgcttatacatttggatatactgacgaattgaatattaattctcaatctgattttttaaaaaatttaaaagattggggttttaaaataaataaatttaataaagttattaaaggaattaataatttagttataaatcataaaaacttagaggaaaaaagaaaatccatagattttgatatcgatggaattgtttataaagtaaacaattttgaattgcaaaagcgacttggttttgctgctaacgcacctaggtgggcaattgctcataaattttctgcaaatagatctgtttctgaaattgtaaatatagaaattcaagtagggagaacaggagctcttacaccagttgctaaaattaaaccaataaatatt

SEQ ID NO: 319857 - DNA, 994 bp, Unknown
  Bacterial polypeptide expressing nucleotide sequence isolated from the Sargasso Sea
agatatagacattagaggtgaggttttcatagaaaagactgattttattaagttaaaaaatgattttgcaaatcctagaaatgcagcatctggttcattaagacaaaaaaatccgttagaaactaaaaaaattccacttaattttgtggcttatacttatggttactttgaaagtaataaaataaagaaacagtctgattttttaagttccttgaaaaaatggggttttaaaacaaatgagcataataaggttttaaaaactattaaagatttagatagttttcacaaaaaatttgagaatgataggttcgatttaaaatatgatgttgatggtttagtttataaaatcaacaatcttgatcttcaaaacagattaggatttacagcaaattctccaaggtgggctatagctcataaattttcagcagatagtgcttattctataataaaagacataaatatacaggttggcagaacaggtgcattaactccagtagctagaatcaaaccagtaaatattggtggcgtagtagtatcaaatgcaacacttcataacgaagatgaaataattagaaaagatataagacttggtgatactgtaaaagtagagagagcaggtgacgttattcctcatgttgttttagttgacttaaaaaaaagaaaatctagttcaaaaaaatttgtttttccaaaaaaatgtccctgtggttttgataccataaaagaatttaataaactaactaaaaaatatgatgcagttaggagatgtccagatagaggatttgaatgtgaaaaaatagctgtagaaaaaataaaacatttcatatctaaagaagcacttaacattgatggtttgggcaagaaagtagtggaaaagttttgggatctacaattgataagatttcctcaagatgtttttaatctagattatagtcagatttcaaaattagaagggtggggtaatctttcagtctcaaatttaaatttttcatag

SEQ ID NO: 319858 - DNA, 916 bp, Unknown
  Bacterial polypeptide expressing nucleotide sequence isolated from the Sargasso Sea
attcctaaaaagatctcagaaaaaaattttccagaggagatagatataagaggagaagtttatataaaaaattctgattttaaaaaactatcagataaatttgctaatcctagaaatgcagcctcaggctctttacgacaaaaaaacccagatgagacaaaaaaaattcctttaagatttattgcttatacttttggttttcagaaaaacatgaaggttaatttacaaactgagtttctaaaaaatttagataaatggggttttaaggttaattcatttaataaaagaattattagtattaaaaatttactagaaaattataaatccttagaaaaaaaaagagatgaattagattttgatatcgatggtatagtttataaagttaacgatcttgagttgcaaaaaagattaggaaatgtggccaatgcaccccgttgggcaatagctcataaattttctgctaatagcggtgtatcaaaaattttaaatatagagatacaaatagggagaactggagcgctaacacctgtggctaagataaagccaataaatattggtggagtagttgtttccaacgcaaccttacataatgaggatgaaattaaaagaaaagatattagaataggagatgttgccactattgaaagagcgggtgatgttatacctcatataacttctattcaaattaaaaaaagaaataaaaattcgaaaaaatttatatttccaatcaaatgtccatcatgtggatcctcaacaatcaaagattttaaccttgtgacaaaaaaaaatgatgctgtaagaagatgttctagtgagggatatgaatgtgaaaaaatttctatagaaaaaatcaaacattttgtttcaaaagaggcatttaatatcgaaggttttggtaaaaagatagttgagaaat

SEQ ID NO: 319859 - DNA, 697 bp, Unknown
  Bacterial polypeptide expressing nucleotide sequence isolated from the Sargasso Sea
accagaggcgatggtcaaattggggaaaatattacagacaatgtaattacaatcaaggatataccaaaaatcttaaaaacaaaatatccaccagtttctattgaaattagaggtgaaatattcatcactaaaaatgattttatgaagctgaatacagataacaaatttgcaaatccaagaaacgccgcggcaggaagtctaagacagttggattcaaaagttaccgcaaagcgtccactcaaatttatcgctcatgggtttggatcattttctgaagaaaagagtagttattacgatcaattaattgaattcaaatcgtgggggatcccaatcagcccattcctaaaaaaagccaaaaacctaaaagatttaataaagatttatgatgaagttaacaaaaaaagagctgaaataccctatgatattgatggacttgtatacaaagtgaataatttatctttgcaaaatagattaggcattgtgggcaaatcccctcgatgggccatagcccataaatttgcttcagaaactgcacaaactgaaattaaaaaaatagatattcagattggaagaactggatcggtaacacctgtcgcaagactgaaatcaattaacattggcggtgtactggtatcaaacgctacattgcataattttgaagaaatagaaaaaaaagatattcgtgagggtgactccg

SEQ ID NO: 319860 - DNA, 776 bp, Unknown
  Bacterial polypeptide expressing nucleotide sequence isolated from the Sargasso Sea
taataaagcaaaacataaagtaccaatgctttcattatcgaatgcatttaatgaagaagatcttataaattttgaaaaaaaaattattaattttttaagcttaaaaaaaagcgaagaaatagaatttagtgctgagccaaaaattgatggaatatctgcttctttaacttttaaaaatggtatttttgtaaaaggcctttcaagaggtgatggaatagaaggagaagatattacagaaaatttaaaaactataagcgatataccaaaaaaaatatcttccaaaaactttccatctgaaattgatattcgtggagaagtatttatcgctaataatgattttaagtttttaagtgaaaaatttgcgaatcctagaaatgctgcctcgggatctttaagacaaaaaaattcacaagaaacaaaaaaaatacctttaaaatttattgcttacacttttggatatacaagtaaactagatataaaaaatcaatcagattttttaactaatttaaaagaatggggtttcaaaacaagcaagtttaacaaaacaattaaaggaattaacaatttagttttgtatcacagtcaatttgaaaaaaaacgatatgatatagattatgacgtggatggtattgtatacaaaataaacaattttgatttacaaaaaagattaggttttgtagccaatgcaccaagatgggcaatagctcataaattttcagcagatagttcaatttcaaaaataataaatatagatatacaagtgggaagaacggggg

SEQ ID NO: 319861 - DNA, 844 bp, Unknown
  Bacterial polypeptide expressing nucleotide sequence isolated from the Sargasso Sea
agcccaatgttgtctcttggcaatgctttcgaaaaaaaggatattacagattttaaaaagaaaataagtaattttttgaattttaaatctgatattcaattttcatcagagccaaaaatagacggaatatcatcaactttaagatatgaaaatggtgatttagtttttggtttatcgagaggagatggtacctttggtgaaaatatcacagaaaatttagcaacaattgatgatattccaaaaaaattattagatccaccagaaattatagaagtacgtggcgaagtatatatcggaaaaaaagattttgagaaaattaaggacaagtttgctaatcctagaaatgcagctggtggatctttaagacaaaaaaattccaatgaaactgctaaaattccattaaaatttttcgcttacggcattggtgaaataaaacccaagctctttaaaaaacaatctgatttattaaaaagacttaagacatggggtttcccggttaatgaattatgcgaaacggtaaataatactgaggaaattgaaaaaaaccatatgaaactagaaaatttgagatcaaatttggattacgatgttgatggagtagtttataaagtcaataatctagattttcaggaaagattaggttcaaccgcaaactctccacgatgggctatcgcgtacaaattttcatcagtaaaggcttcttcaaaaattacaaacattgtaattcaagtagggagaactggagcaattacacctgtagctaaaattaatcctgtaactgtaggcggtgttgtagtttcaaatgcaacattacataatgaagatgaaattaatagaaaagata

SEQ ID NO: 319862 - DNA, 933 bp, Unknown
  Bacterial polypeptide expressing nucleotide sequence isolated from the Sargasso Sea
agttgaatattcttgtgaaccaaaactcgatggaattgcagtaaatttaacatacaaggaaggacttttagagatagcaactactcgtggtgatggcaaaaccggagaagatattactcacaatgttaagacaattaagtcgatccctctttctttgataagtaaagatagtaattatcctgaacacatagagataaggggagaagttttcattgagaaagctgcctttgatttagcaaataaaaactctattaaggctggagagaaaacatttgctaaccctagaaatgctgctgctggaagcttaaggcaattagatcctgcaattacagcttctaggcctttacagttttttgctcatggagttggttatgttcaagctaaaaaatttaatctacccgaaactcatgttgagatattggaactctacagatcatggggtttgccaatcaatccaataactaaagttgcgaaaaatatagaagagtgtaacgagtatttccttactatcattgataaacgtgagaaacttccatatgaaatagatggcgtagtttacaaggttaataacatttctaagcaaacttcactcggacaggtttcaagagctcctagatgggcaatagccagaaaatttcctgctgaggtgggcactacgattgtcaaaactatatcttttcaggttgggagagtcggcagtatcactcctgtagcagaatttgtaccagtcaatattggaggtgtgacagtctctcatgcgagtattcataattttgatgaaattgacagattggatgtcagggaaggggatacagtaaaaataaaaagagcgggtgatgttattcctcaaatcatttcagtagaaaaagaaaagagaaagcaaaaatcaaagaaagtcattccacctataagttgtccctcttgtgatagcga

SEQ ID NO: 319863 - DNA, 874 bp, Unknown
  Bacterial polypeptide expressing nucleotide sequence isolated from the Sargasso Sea
tatgcaagacattcaactcgataaacgcctatctgaactgctttctcaagctgtcacgccacacaatgcgcagccattgatgcaggcgctctgccaatctctgaatgaacacaatattcgttactatgtcgatgatgcgccaagcattaccgactccgaatacgacagattaatgcagcagctaaaacaacttgaggccgagtatcctcagtttgttgctgccgactcgcccacccaaagagtcggcggcatggcgctggcaaagtttgagcaaatcactcatcttaagcccatgttaagtctcgataatgccttcgatgaggcggactttagtgcgtttcataaacgtgtcagcgacagagttggcgaagtgagtttttgctgtgagcctaagcttgatggtttggcggtgagtattttgtatcgcaatggtgtgcttgagcgcgccgcgacccggggtgatggtaccgtgggtgaggatattaccgaaaacgttaaaaccattaagtcgattccgctcaaactgcgtggtgacaactatcccgaattggtcgaagtgcgcggcgaagcctttatgcccaaggcggcgtttgaggcgctaaatgagcgtgcgcgcttaaaggatgaaaaactgttcgtaaatccgcgtaatgcggcggcgggcagcttacgtcagctcgacagtaaaattaccgcgtcacgggcgctgtcgttttatgcctacgccttaggtgtggtggagccgacgtcccacgaattagctaagacccactacgagcaattgcagcaacttaaatcttgggggctgccagtcagcagcgagattaaagtctgcgacgaactcagccaagtctttgcctactatcaagatata

SEQ ID NO: 319864 - DNA, 814 bp, Unknown
  Bacterial polypeptide expressing nucleotide sequence isolated from the Sargasso Sea
taaaccttctaaaatttttaagaaagttaagcataaaatacaaatgctttcattgagcaatgcttttgataaagaagatatgataaattttgaaaaaaaaatttgtaattttttaagtttaaaaaaaaatacaattattgaatatagtgcagaaccaaaaattgatggaatttcagcctcgttactttataaaaatggtaaatttattcaaggtctttcaagaggtgatggtgtagagggagaagatataacggaaaacttaaatactataaaagatattccaaaatatatttctaaaaaaaattttccagaagaaatagatataagaggagaggtttatataggaaataaagattttaatttaataaaagataaatttgctaatccaagaaatgctgcgtccggatctttaagacaaaaaaatcctgatgagactagtaaaataccattaagatttattgcatatacatatggattttctaaaggattaagtattagcactcaatctgaatttttaaaaaatttaagaatttggggttttagaataaatgaatataataatattattaaaggcattgataatttaatgcaaaatcacaaaaatttggaagaaaaaagaaataaaatagattttgatattgatggaattgtttacaaaataaataattttgatttacagagaagacttggatttgtagctaactctccaaggtgggcaatagcacataaattttcagctaatagttcagtttctgaaattttaaatatagaaatcacaagttggaagaactggagcccttacacctgttgcaaa

SEQ ID NO: 319865 - DNA, 934 bp, Unknown
  Bacterial polypeptide expressing nucleotide sequence isolated from the Sargasso Sea
agaattagagagaaaatataaatacctcaatcacaaaagttccccatcaaaaatagttggtcataaaccttcaagatattttaaaaagattgctcataaagttcctatgctttctctagggaatgctttcacagaaaacgatcttaaaaattttgaaaaaaaaatacttaattttttatctcaaaatgataataaaaatatttcttatacatcagaaccaaaaatagatggcatttcagcttcattgacttatattaatggaaaattagaacgtggattgtccagaggggatggtaaggaaggagaggatatcactactaatctttcaacaattaaagatattcctaaagttattcagtcaaaagattttccagaagaaattgatattagaggagaagtttttattcaaaataatgattttgatagtttaaaaaacaaatttgcaaatccaagaaacgcagcttcaggttcacttagacaaaaaaattctgaagatactaaaaaaatacctttaaaatttattgcatacacttttggttttcaaaagggtttaaaggtaaataaccagtttgattttttaaaaaagttaagtgaatggggatttaaaacgagccctttgaatagattgataacaggagtgggagagctaattaaaaattataatctagttgaaaaaaaaagagctaatttagattttgatattgatgggttagtatataaaataaatgattttacattacaaaaaagattaggctttgttgcaaatgctccaagatgggcaattgcacataaattttcctctaataaagcaatttctaaaatcatagatattgatattcaaataggaagaacaggagctttaacacctgttgcaaaaattaaacctatcaatattgggggtgtattagtttctaatgcaacattacataatgag

SEQ ID NO: 319866 - DNA, 829 bp, Unknown
  Bacterial polypeptide expressing nucleotide sequence isolated from the Sargasso Sea
tgagataattactgagaatttaaaaacaattaaagatattcctaaatcaataaaagataaaaaatttcctaaagatgtagatataaggggagaagtatatataggaaaaggagattttgaaaaaataaaggatcgatttgcaaatccaagaaatgcagcatcaggatcacttagacaaaaaaatccaaatgaaaccaaaaaaattccactaagatttattgcttatacatacggatttaatagtgaaatgaattttaaaaaacaatctgaatttttgaatcttcttaaaacttggggatttaatacaaatacccataacaagattataataggtttaaataatttagttcaaaatcataaagattttgaaaaaaaaagatacgatctagattttgatgtagatggattagtatataaaataaacgatttagatcttcaaaagagattaggttttgttgctaacgcccccaggtgggcaatcgcacataaattttcagctgatagttcattttcaaaaatattaaatattgaaattcaaataggtagaactggtgcattaactccagttgcaaaaataaaaccagtgaatataggaggagttgtagtttcgaatgcaacacttcataatgaagaagaaataattagaaaagatataagagcaggcgatacagtcaaggttgaaagagcaggagatgttatcccacatgtactttcagtggatttaaacaaaagactaaaagaatcaaaaaaatttttatttccaaaaaattgtccatcatgtggctctaaagtaataaaagattttaacaaaatttcaaaaaaatatgat

SEQ ID NO: 319867 - DNA, 729 bp, Unknown
  Bacterial polypeptide expressing nucleotide sequence isolated from the Sargasso Sea
aatattcaaaaaaaaaccccgccaaaacttttggatatcagatgtgaaatttttatcggaaaaaaagactttttaaaattgaaagataagtttgcaaacccacgtaatgctgctggaggatcactaaggcagaaaaatcctttggagacatctaagataccattaaaatactttgcatatggatttggtgcagttgagccaatgatatttaaaacccaagctgattttttaaataaaatatctaagtggaaatttaatataaatccattatctaaaattataagaaatctaaaagaagttgaaatagaacataataaaataaatcaaattcgttcatctcttgattatgatattgacggtattgtttataaagttaacgatttaaatctacaaaaaaggttaggtaacacttcaaattcacctagatgggcaatagcttataagttttcggctgaaaaggcttcaactaggattaaagatattgtcattcaagtaggaagaactggagcaattactcctgtcgcaaaagtcgagcctgtaacggtcggaggagtcgtagtatctaatgctacactacataatgaggatgaaattaagagaaaagatatccgagttggcgattcaattattatacaaagagctggcgatgttattccacaagtagtttcagttgataaatctaaaagaaatgagaatagtaaaaaatacatatttccaaaaaaatgcctt

SEQ ID NO: 319868 - DNA, 823 bp, Unknown
  Bacterial polypeptide expressing nucleotide sequence isolated from the Sargasso Sea
aatttaaatgaaaaatttgcaaacccaagaaatgcagcatcaggctctttaagacaaaaaaacccagatgatacaaggaaaatacctttaaaatttattgcttacacatttggttttgaaaaagggttaaaagtaaaaaaccaatttgattttataaaaaaactaaatgaatggggttttaaaactaatcaagaaaataaattaatttctggagttaaaaatttaattaaaaattataaagaaattgaaaaaaaaagattagctatagattatgatattgatgggattgtttataaagtaaacgattttgaacttcaaagaaggttaggcaatatttcaaatgcaccaagatgggcaattgcacacaaattttcttccaacaaagctatttctaaaattttagatattgaaattcaaattggaaggacaggagctttgacgcctgtagcaaaaataaaaactgttaatataggtggagttaaagtgtctaacgcaactcttcataatgaggatgaaatagatagaaaagatataagaattggagacacagtgactgtagaaagagcaggtgatgtaattcctcacatactctctgttgattttagcaaaaggttaaaagaaagtgtgccatttagttttcccaagaaatgcccatcttgtggatcaaaaacaattaaagaatttaacttaataacaaaaaaaaaggatgctgttagaagatgttctagcgaaggttattattgtgaaaagatttcaatagaaaaattaaagcattttgtatcaaaagacgctttaaatatagatggattggaaaaaaaatagt

SEQ ID NO: 319869 - DNA, 883 bp, Unknown
  Bacterial polypeptide expressing nucleotide sequence isolated from the Sargasso Sea
gatcaagaatttgatattttaaaaaatgatattattgaactagagaagaagtataattttttaaatagtgaattttctccaagcaaaagtgttggattcaaaccatccaagaattttaaaaaagttaatcacaaatcccctatgctttctttgagtaatgcctttactaaagaggatttattaaattttgaaaaaaaaatacttaattatcttaataaaaaaaaagattttgaaatagaatattctgctgaaccaaagattgatgggatttctgcatcattaatttatattgatggaaaatttaagactggtttatcaagaggagatggaaaacaaggtgaagatattactgataatttaaagactattacagacataccaaaaaatattttgaataaagattttccaaaagaaattgatataagaggcgaagtttttattcaaaatagtgattttaaaaaaatatcaaacaagtttgctaacccaagaaatgcagcttctggatctttaagacaaaaaaatcctgaagatactaaaaaaattcctctaaaatttatcgcatatacattcggattcgagaaagggcttaaaatagaaaatcaaaaagattttttaaaatgtttaaagaaatgggggtttaaaacaaactcacttaatatttctgcaaaaggtattgataacttaatgactaattataagagaatagaggaaaaaagagataaaatagattttgatgtagatggaatagtttataaggttaattcttttgaattacaaaaaagattaggtaacgttgctaattcgcctagatgggctattgcacataaattttcagctaacaaaggaatttcaaaaattaataatatagacatacaaatggaag

SEQ ID NO: 319870 - DNA, 868 bp, Unknown
  Bacterial polypeptide expressing nucleotide sequence isolated from the Sargasso Sea
aaattgacatatggattgtcaagaggtgatggtatttttggtgaagatattacagacaatttatcaatgattagtcaaataccaaaaaaaataaacaatccacccaaaatagtcgatgtcaggggtgaagtttatatttcaaaaaaagactttgaaagcatcaagaataaatttgctaatccccgtaatgcagcaggaggatcattgagacaaaaaaactctaatgaaacaaaaaaaattcccttaaaattctttgcttacggaataggtaaaattgaacctaaaatttttaaagatcaaacagaattacttaaaaatttaaaaaaatggggttttcaaataaatcaacattgtaaaaaaattaaatcaattcaagaaatagaaaaaaaccattctgagttagaaagtattcgctcaagtttagattatgatgttgatggaattgtttataaagtaaataatttaagtttacaaaacagacttggttcaacatccaactcaccaagatgggcaattgcatataaattttcatcagttaaagcaatttcaaaaattaatgagataatcattcaggtaggaagaactggtgctattactccagtagcaaaaattgacccagttactgttgggggagtggtagtatcaaatgcaacattacataatgaggatgaaattactagaaaagatataagagtaaatgacactgtattagtccaaagagctggagatgttattcctcaagttttatccgttgataaaacaaaaagatcaataaaaagtaaaaaatttatttttcctgaaaaatgtctttgcggatacaaaacaaaaaaagaaataagtcttacaacaaaaaaaacagacgcagtca

SEQ ID NO: 319871 - DNA, 851 bp, Unknown
  Bacterial polypeptide expressing nucleotide sequence isolated from the Sargasso Sea
tttttctagaaatgagcataatttccttaaaaagaaagactctattcaacatataataggatccccgccctcaaaaaaatttaaaaagattaaacataaaaaagcaatgctctccttatctaatgcttttggaaaagaagatatgaatgatttcttaaaaaaaattaaaaattttttaaaaagttacgattcaactattgatattttttcagaaccaaagatagacggaatttctgcttcattaatttatgaaaatggtctgcttaaaactggtttatcaagaggtgatggcgaaactggagaggacatattaaataatttaaaaactattaatcaaattcccaaaaaaattgatgctaaacaaattccagaaatattagaaataagaggtgaggtttacatagggaaaaatgattttgaaaatataaaagagaattttgcaaatccaagaaatgcagcaggtgggtcgttaagacaaaagttttcagaagaaactgcaaaaataccgctacaattttttgcacatggatttggagttgttgaaccaatgatttttaaaacccaatcggaatttttaaaaaaaataaatcaatggggattttcaactaacccacacagcaaattagtaaaaaacttaaatgagattgaggatcatcatcaaaagattgagagcttaagagcttcattagactatgacatagacggtctagtttacaaagttaatgatgttgaattacagtcaagattaggaaacacatcaagctcaccaagatgggcaattgcctataaattttcttcagaaaaggctacgacaaaaatcaaagatatagctattcaagttggaaggacgg

SEQ ID NO: 319872 - DNA, 835 bp, Unknown
  Bacterial polypeptide expressing nucleotide sequence isolated from the Sargasso Sea
tcaatataaaaagtcacactccccaacccaaagggtcggcagttctcctattaaaaaattcaatacaattgaacataaagaacctatgctatcactatcaaatgcaatgaattctaatgaattatttgatttccataatcgaaataaaaaaaccctcaaccaaaaatcgataacgtatgttgctgaacccaaattagatgggctaggagttacacttacttattctaaggggtcactgctccatggagcgacaaggggagatggtaataatggtgaagatattacacacaacctaaaaacaataaaatctattcctctaaagttaagagatgtggggaaagaaattcctaagtacatcgaaattcgtggcgaggtttttattaaaaaaaagaattttcttaaactaaacaaactgcaagccaaaactggagaacaaatctttgccaaccctagaaacgcagctgcaggaagccttcgccaattagaccccaaaataacagcgacgagaccactttctattttttgctatgaagcaggattaattgaagggaaactttttaaagaccataactctttattgaaagcattaagaatatggggatttccagtaagccctcttataaagaccattactggacatacaggtttaaaaaaataccaaaaggatcttgaaaaaattagaaacgatctcccttatgaaattgatggtaccgtttttaaaataaataattataagcaccgtgaaattttaggctacagaagcagatctcctaggtgggcaattgcaggaaaatttaaagcgcaacaggcgactactatcatacggaatatagaa

SEQ ID NO: 319873 - DNA, 707 bp, Unknown
  Bacterial polypeptide expressing nucleotide sequence isolated from the Sargasso Sea
tatgaatttagaaaaaaaacttgattatatttgtgaggctaaaattgatggcctttcacttaatttgacatacaaagatggtatacttgtatcagcagcaacaagaggtgatggatttataggagaggatgtaacacaaaatatagtaaacataaaaaatataccaaaaaaattaaaaggtaattttcctagttcgatagaagttagaggagaagtatttctaacaaaaaaagattttgaaaatattaattcaaaattagatgataaaaatcagtttgctaaccctcgtaatgcagctgcaggaagtttacgacaacttgatgttaatataagtaaatcaagaccattaaagtttttagcccatggattaggatattcatcttatgaatttacttattttgatgaatattatgaaaagttagaaaagtggggaattaaaaaaaataatataaatctcaaagcttcaaatataaattcaatttttgaattctataatagtatgaatgagactagaagtactttagattacgacatcgatggtttagttataaaattaaataaaatatcaaatcaaaaaagacttggtaacgttggcaaaaatccaagatgggcaattgccttaaaattctctgcagaaaaagctagaacaaaaatacaggatattgattttcaagttggtagaacaggatccataactccagtagcga

SEQ ID NO: 319874 - DNA, 424 bp, Unknown
  Bacterial polypeptide expressing nucleotide sequence isolated from the Sargasso Sea
attgggctgggcagaggcctatttcgagcgcgatgcaccggtggtggcagacgcggattacgaccaggccatgaggcaactggaggcaatcgagcgggagtttccagatctggtgacgccagattcaccgactcaacgcgtcggctcagcgccattgggtgagtttgagtccgtggagcaccgtttgccgatgctttctctcgataatgcgttttcttctgacgatatggacgacttccaccgccgcgtcacggagcggcttggtgatggtgatgtgtcctactgctgcgagcccaagctcgacggtgttgccgtcagtgtcgtttatgagcacggtgcattggtactggcggccacccggggtgacggtacccgcggtgaaaacatcacggcgaatgttcgaacgatcagcaacgtaccttga

SEQ ID NO: 319875 - DNA, 808 bp, Unknown
  Bacterial polypeptide expressing nucleotide sequence isolated from the Sargasso Sea
gtttattaaacgttcagtgaaatttttaaatttagataatgatgatgattttcaatatatctgtgaaccaaaaattgatggattatcattaaatcttgtctacaaaaatggaaatttaatatctgctggtacaagaggggatggatttataggagaagatgttactgaaaatatattaaatataaaaaatattccaccaaagttaaaaaaagactttccagattttattgaaataagaggagaagtattcttaaacaagagtgattttgaaaaactaaattctaagttagaaaataaatctaagttcgcaaatccaagaaatgctgcagctggtagtctaagacaacttgatacttctattagtcatagtagaccacttaaatttattcctcacggtattggtaaatgttcacacaattttgataacatagagaattattatgatcgacttaagaattggaacatttctccaaataatttaagcaaaaattgtcaatcaattgaacaaattattaaattttataatcaaataaatcaaaaacgatcaggtattgattatgatattgatggattagttgtaaaaataaatagttttaagctacaagaaagattaggttatgtaggaaaaaacccaagatgggcaattgccataaagttttctgcggaaaaagctaatactataattcaatctgttgatttccaagttggaagaactggtgcgattactcctgtagccagattacaacctgtaaatttaggtggtgtaattatatctaatgcttctttacataattttgatgaaataaat

SEQ ID NO: 319876 - DNA, 406 bp, Unknown
  Bacterial polypeptide expressing nucleotide sequence isolated from the Sargasso Sea
aatggctgagcaacagcagcgggccgcggaattgcggtccctgctcaaccgagctgcccatgcctactacgttgtcgatgccccggtcatggaggacacggtttatgaccggttgtaccgggaattgcagcaacttgaacaggccgatcccagcctgctcagcggtgacagtccaacccaaagggtgggcggaccaccggcaacgggcttccacagcgtggaacaccgaatcccactgcaaagtctcgacaacgcctttgaccagggagaactgagggcatggcatgaacgccttgtcaaggtgctggaccgagctgacgacagcgcattacccatggtgggcgagctcaagattgacggcaatgccctggctctgagctaccgccatggggtgctggcgcgggca

SEQ ID NO: 319877 - DNA, 832 bp, Unknown
  Bacterial polypeptide expressing nucleotide sequence isolated from the Sargasso Sea
gatcttgtaactccagagtcccctagccaacgtgtgggagcgccgccgctatctcaattcgagaaagttacgcaccttaaacccatgttgtcgcttgataaatcaaccaatcaaaaagaacttaaagattggatggaacgttgtgagaacaggcttggtccaacggaaagaatgtcatatgcgtgcgagcccaagatagatggcgtggcagtgtcgctgacctatcgggaaggggttttagagcgcgcatctactcgaggagatggagagacaggggaaaatattaccgctaatgtcaggacgataagatccattcctttatcgcttggcgataaagattgcccatcattttttgaggtccgtggagagatttacatggaaaaatcaaagttccatctcttcaatcaaaaggcctcagagaaagataacaaacagctaattaatccaagaaacgcggcggcaggaagtttaaggcagcttgattctagcgttaccgctcaaagacccttaacgatgttttgttatagcttaggtgccctggaagggtcatggagccctagtacccatgaagaggttatgaggcagttttctaagtggggatttcgtgttaatccgtccacctgtgtcgcaacgactcttgtggagatagagtcttatttggaaaaagtggcgagttctcgggctcagttggattatgagattgacggtgtcgtcataaaagttaacgaattaactcatcaagctgctctaggcgaaatgattcgtcgacccagatgggctatcgcatataagtttccggcagaagaagtaaccagtcggatattggatgtta

SEQ ID NO: 319878 - DNA, 805 bp, Unknown
  Bacterial polypeptide expressing nucleotide sequence isolated from the Sargasso Sea
gactaaacatagagttccaatgctgtctctgggtaatgcttttacagaggatgatttaataaatttcgaaaaaaaaattttaaattttttaaataaagataataattttaggataatatatagtgctgagcctaaaattgatgggatatcggcgtcattaatttacagaaatggaaaatttgtaactggtctatccaggggcgatggaaaagaaggagaagatataacagaaaacttaaaaactataagagatattccgtatctaattaagtcaaaaaattttccaagagaaattgatattagaggtgaggtatttatccaaaatagcgattttgaaaaattaaaaaataagtttgcaaacccaagaaatgctgcctctggatccttaagacaaaaagatcctaaagaaacaaaaaaaattccattaaaatttattgcttatacatttggtcatgaaaaaggtttgaaagcagtgtcacaaaatgagtatcttgaaaatttaaaagagtggggttttaaaaccaatcccttaaataaaaccttggataaaatagaaaatttaatgattaattaccaagaaattgaaaaaaaaagaggtgaaatcgattttgatattgatggcattgtttataaggtaaacgaatttaatcttcaaaaaagattgggtaatgttgctaatgccccaagatgggctatcgctcataaattttcagcaaatagcggaatttcaaagataaatgatattgagattcaaattggaagaactggtgcattaacaccggtagcgaaaattaatcctgtaaat

SEQ ID NO: 319879 - DNA, 883 bp, Unknown
  Bacterial polypeptide expressing nucleotide sequence isolated from the Sargasso Sea
aatgacgaacttgaggcgcagttccccgaattggttcgtgaagacagcccgacaaagaaagtgggagcggccgtgcgggaagggtttcgcaagatcacccacgcgcggccaatgttgtccttgggaaatgcattttctgacgacgatgtttacgaattcacggatcgcgttcgtcggtttcttacgcttgcggaggatgaggttctggaaattgccgccgaaccgaagatcgatggtctgtcattgtctattcgctatgagcaaggccggttcgttcacgctgtaactcgcggtgacggtggtgtgggtgaagatgttactcagaatgtcgagaccatgggcgacattccccagaaacttcccggctcggtacccgatgtccttgagattcggggagaggtctacatgtctaaacaggatttcgccgatcttaacgctcgacaagcagccaccggacagaaaaccttcgccaatccccgcaatgcagctgccggatcgctgcgtcagctggatccgacgattaccgcggcccgaccgctgcggttcttcgggtatgcgtggggcgaagtgtcggaaaacttcggggcaacgctttgggaggcgcgcagtcggattgccacatgggggtttcaattgaacgaaccggcggccctttgcacgtctgctggggcgctactggcctattacgtcgatatgacgtaccgccgcccggagttaccgttcgatatcgatggcatcgtctacaaggtgaaccgtttggattggcaggagcgtctaggttttgtgagccgcgcgccgcgctgggccattgcccataagttcccggccgaaaaagctgagacacgccttaacaaaatcaccattcaggtcggccggaccggca

SEQ ID NO: 319880 - DNA, 814 bp, Unknown
  Bacterial polypeptide expressing nucleotide sequence isolated from the Sargasso Sea
catgaattctaaaaatattgatgaaaaaaaaatcataaaaagattagaagcattagctgagctaataaaaaaacataattataattatcatactttagataaacctctaattttagataaagaatatgatagtttggtaaaagaaaatcaaaaactagaaaaaaaatacccttttttaaagcttaaaaatagtccagaaaataatgttggcagcaagatatctaataaatttattaaaattgaacacaaatcttcaatgctttctttagctaatgcatttgatgaaaaagatatttacgaatttgatgacagaataaaaaaatttttgaatcttaaaagtagtaaaaaatttgaatatttatgtgaacctaaaatagatggtttgtctcttaatttaacatataaaaatggaaatttaatttcagcagctactagaggagacgggagtataggtgaaaacgtaacaaataatattttacatataaaagatatcccaaatcaattaaaatttgattatccagatttaattgagataagaggggaaatttatttaacaaaatcagattttgaatctcttaataaaaaattgagtgaaaaagaaaagtttgctaacccaagaaatgccgcagctggaagtttaagacaattggatagtaaaattagtcaatctcgacctttaaagtttacagctcatggattaggtttttgttcaaaatcttatagttcgttaattgattattatgataatctaacaaaatggaaaatctatccaaacccattaagaaagaagattgcgtctattgaagcaattatg

SEQ ID NO: 319881 - DNA, 871 bp, Unknown
  Bacterial polypeptide expressing nucleotide sequence isolated from the Sargasso Sea
tatcaatttgataaattagtcatagaacttttggatttagagagagaggatccgacacttatacaagtagattcaccgacccaaagggttggctcaagaccgatagatggttttactcaaattgatcatctaacaccgatgctctcactagacaatgttttcaccatggaagaattaatgtctttcgaaaggagagccaaagataaattatctttagatgataaaattgagtttatcgctgaaccaaaactagatggtgttgcagtcaatttagtatatgaatcaggaatattatcttatgcaacaactagaggagatggaacaacaggtgaagatgttactcacaatgttcttacaataaaatcaatcccaataaaactgaaatcatcatcaccacccaaaacaatagaaattcgtggtgaaataattatttcaaagaatgatttcaagataatgaacagagacaatgtaggtaaagagttgaagatatttgcaaatcccagaaatgccgcggcaggaagcattcggcaactagatccaaatatttcaaaagacagaccattgaaattttatgctcatggatacggtttactatccgatgaggataaattctctacacattatgacgtcatgaattacctaaatgactcaggaattgtcatctctccttactcagaagttgtacttggcgctgaggaatgtgggaaatattatgaaaaaatcgattctcttagagattctcttgattttgaaatagacggcgtagtttacaaggttaataacatttcacaccaaaaagaacttggcttcgtttcaaaagcgcctagatgggcaattgcccacaaattttcttctattgaggttgaatcga

SEQ ID NO: 319882 - DNA, 916 bp, Unknown
  Bacterial polypeptide expressing nucleotide sequence isolated from the Sargasso Sea
attgaaatactggtataaaaaaaaagtaaaattatttaaaaagtataataaattttattatactaaaagtaatccattagttttagatcatgaatacgatgaattaaaaagagaaatatcgcttctagaaaaaaaatatgattatcttaaatcaaaggattctccattagtatctgttggctataaaccatctaaaaattttaaaaaggttttgcatagaactcctatgctttccttggcaaatgcattttcagaaaatgatttattaaattttgaaaaaaaaattttaaattttctctcaaaagaggaaaattttaaacttacttatagtgctgaacctaaaattgatggtatttcagcatcacttgcatttaaaaatggtaaatttattcaaggtctatctagaggagatggtaaagagggcgaagatatcacagctaatttatcaactatagatgatatcccgcacaatattaactctaaagattttcctaaagaaatagatattaggggagaggtatttattaaaaacagtgattttgagaatttaaaagaaaagttcgcaaatcctagaaatgctgcctcaggatctttgagacaaaaaaatccagaagatacaaaaaaaataccattaaattttatagcttatacttttggttatgagcagggtttaaagcaaaaaaaacaatctgattatttgaaaaaattatctgattggggttttaaaattaatccacttaataaaacaatttctggtatcaaaaatttaattcaaaattataatgatgttgagcagcaaagagcaaatttagattttgatattgatggcattgtttataaaattaacgattttgagctgcaaaaaagattaggaaatgttgctaacgctccaagatgggcgattgcgcacaaattc

SEQ ID NO: 319883 - DNA, 826 bp, Unknown
  Bacterial polypeptide expressing nucleotide sequence isolated from the Sargasso Sea
cctgtgggagagctgaaaatcgacggcaatgccttggccatcagttaccgcaacggcttgatggaacgcgccgccacccgtggcgatggcagtcgtggtgaagacatcaccgccaacgtgcgcaccatcagctcgatcccgcttcgtcttccgcttgagaatccacccgagtgggccgagatccgcggtgaagccttcatccccaaagacacctttgaggcgatcaatgccgaacgggacaagcgtggtgaagcattgttcgccaatccccgcaatgcctgcgcaggaaccctgcgccaactcgacccgaaggtggttgctgcccgacgactcgatttctttgcatacacgctccatctgcctcctgagcgacaaccccagagccaatgggaggtgctcagctggctggaacaagcgggcttccgcgtcaatcccaaccgtgagctctgccaggatctgagtgggattcatcgcttctgcgacagctgggaagaggcccgccatcaacttccctatgccaccgatggcgtggtcgtgaagctgaacaatctggcgcttcaagatgaagcgggtttcacgcaaaaagcaccccgctgggctgttgccttgaagtttccttcggaggaagcaccgagccgattgcttcgggtttccgttcaggtggggcgtacaggggtggtgacacccgtggcggaattcgaaccggtggcgctggcagggaccagcgtcagccgcgccacgctccacaatgccgatcgaatcgccgaactggacctccacctaggcgacaccgtggtggtgcgaaaagcaggggagatcattcccg

SEQ ID NO: 319884 - DNA, 803 bp, Unknown
  Bacterial polypeptide expressing nucleotide sequence isolated from the Sargasso Sea
agaattttcttcagaaccaaaaatagacggtatttctgcaactttaatttatgaaaatggaattttaactaaaggtctttcaagaggcgacggtgttactggagaagatattttagaaaatctcaagactattaatgagatcccaaaaaaaattaaaggtaataatatcccttctttacttgaaatccggggagagatatatattggaaaaaaagatttcaataaaataaaaggaaattttgccaatccaagaaatgctgcgggtggctcgcttagacaaaaagactcaaaagaaacttctaaaatacctttaaaatattttgcttatggatttggagcaataaaaccaatgatgtttagctctcaagcagaatttttagaaacaataaaaaattggggtttctctactaaccctttagtaaaagtagtaaaaaatttagaagagattgagtcccaacattctttcatagactctaaaagatctgcactagattatgatattgatggattggtttataaagttaatgacttaaaattacaatcaagacttggcaatacatcaaattctccccgttgggctattgcgtataagttttctgcagaaaaagcagttacaaaaattaaagatatagctatacaagttggtagaacaggagcaataacacctgtagcaaaagtagaaccggttacagtaggtggagtagttgtttcgaacgctacattacataatgaagacgaaattaatagaaaagatattagaataggtgatacggttcaaattcaaagagcaggagatgttattc

SEQ ID NO: 319885 - DNA, 880 bp, Unknown
  Bacterial polypeptide expressing nucleotide sequence isolated from the Sargasso Sea
acttataaaaatggtaaattaattatgggtttgtctagaggagatggtattgagggtgaggtaattaccgaaaatttaaaaacaataaaagatataccaaaaaatattaatagctcatcttttccaaaaaatatagatataagaggcgaagtattcattaaaaataaagattttaaaaaattaaatgatagatttgctaatcctaggaatgccgcttcaggctcattaagacaaaaaaatcccaatgatacaaaaaaaatacctttgaattttattgcctacacttttggttattttgaaaataatactttaaaaaaacaatctgattttctaaaaaaattaaaagaatggggttttaaaacttcgaaatataatgatgttataaagggggtagacaatttaattaaaaatcatgaaaattttgaaagtagtaggtttgatcttgattatgatgtagatggattagtttataaaattaatgattataatttacaaactcgtcttggaaatgtaactaatgcaccacgttgggcaatagcacacaaattttctgcacatagcagtttttcagaaattttaaaaattgatatacaggtcggtagaacaggggctttgacgcctgtagccaaaattaaacctgtaaacattggaggtgtactagtttcaaatgctactttgcataatgaggacgaaataaatagaaaagatataagaataggtgatactgtaaaagtagaaagagctggagacgttataccacatgtagtagctgttgatttacaaaaaagaaaaaatgattctaaaattttcgaatttccaacaaaatgtccatcatgtggttctataacaattaaagaatttaataaattaacaaaaaaaa

SEQ ID NO: 319886 - DNA, 856 bp, Unknown
  Bacterial polypeptide expressing nucleotide sequence isolated from the Sargasso Sea
aataattttttaaataataaatctgaaattcaattatcgtctgaacctaaaatagatggcatctctgccaccctaaggtatgaaaatggaaagttagtttatggattatcacgaggagatggtgtttttggtgagaatattactgagaaccttacaacaataaaagatatacctaaaagtttaacaaactctcctagagttatagaggttagaggtgaggtttatataggtaaaaaagattttgaaaaattaaaagataaatttgctaatccacgtaatgcagcgggcggttctctaagacaaaaagactctaaagagacagccaaaatacctttaaaattctttgcctatggcataggtgaagttaatccaaaaattttcaaaaaacaaacagagttacttaaaaaacttaaaagctggggatttccaattaattctaattgtaagttagtcaactcaataggagaggttgaaaaaaatcattcagatatggaagccttaaggtcaactctagattatgacgttgatggtatagtttacaaagttaatgatttcaattttcaagaaagacttggttccacatctaatgctccgagatgggctatagcctataaattttcatcagtaaaagcctcctcaaaaattaaaaatatagttattcaggttggacgaactggagcaatcactccagttgcaaaaataaatccagttacggtaggtggtgtagttgtatccaatgctactttgcataatgaggatgaaataaatagaaaagatatacgaataggagatgttattaatattcaaagagccggcgatgtaattccacaagtcgtttccgttgataagtctagaa

SEQ ID NO: 319887 - DNA, 741 bp, Unknown
  Bacterial polypeptide expressing nucleotide sequence isolated from the Sargasso Sea
tttaaatcttaataaaaattttgtgtttgaatacagtgcggagcctaaaattgatggtatatcggcatctttaacctataagtctggaaaattaattagaggtctttcaagaggaaatggagaagaaggtgaggatattaccctaaatttaaaaacaatatccgacattccacactatatagatcaaacagattttcctgacgacatcgatataagaggagaagttttcattcaaaataatgattttgagaaaataaaagatagtttcgcaaatccaagaaatgcagcctctggttctctcagacaaaaagatccaaaaaaaacttcaaagattcccttaaaattcgttgcttacacatttggattttcttcagatgaaacttttgataagcaaacaaattttttgataaaattaaaaaaatggggttttaaaacttcagaattaaataaaaaaatctcaggcattaaaaacctattgtctaatcaccaaaatatagaaaaaaaaagatttgaattaaattatgatattgacggtatcgtttataaaattaacgattttaaacttcaaaaaagacttggatttgtaaccaatgcaccaaggtgggcaatagctcataaattttctgcaagcaattcagttagtgaaattttaagtattgatatacaagtcggtcggactggggcacttacaccagtagccaaagtgaaacctgtaaatataggtggggtagtagtttcaaa

SEQ ID NO: 319888 - DNA, 837 bp, Unknown
  Bacterial polypeptide expressing nucleotide sequence isolated from the Sargasso Sea
atagattttgaagaaaaaaaattaaaaattactggtgataatagaattaaagactctgttggctataagccatcagaaaaattctcaaaggtgaaacatgatgaaaatatgttgtcacttgataatgcatttaatgatgaagatattttagatttctataaaaaattaaataattttttaaatttaaaaccagatactcgaatagaattattagctgaaccaaaaattgatggtatatctgctagtttaaaatatataaatgggatttatgtacagggtatttcaagaggagatggaaatttcggtgaagaaatctctgaaaacttggctactatttcagatattccaaaaaaattaaaaaattcttcagatggtgagctaatagtaagaggtgaagtttatattgcaaaatctgattttaaaaatttagaaggtaaatttgcaaaccctagaaatgcagcttcaggatctttaagacaaaaaaattcaaaaaatacatctaaaatacctctaaaattttttgcttacggaacaatttttaaaaaccacaacattacaaaaatgcaatctgattttttaataaaattaaaagagtatggttttaaaacaaaccctctaagtaaaattttgtataatgaaaaagagttaaaattaaattatagaaagattgaggaaaaacgatcaagtcttgattacgacatcgatggaattgtttataaagtaaataattttaaactacagagaagactaggaaatttaaccaattcaccacgctgggcaatagcacataaattttcagcagaaaaaggtatatcaaagattaaaagtatagaaatt

SEQ ID NO: 319889 - DNA, 790 bp, Unknown
  Bacterial polypeptide expressing nucleotide sequence isolated from the Sargasso Sea
aatttaaaaacaattaaagatatacctcagaaagtaacttctaaggattttccaaaagatatagatataaggggagaagtttttattaaaagaagtgaatttggtaaattaaaaaatgattttgcaaatcctagaaatgcggcttcaggatctttaagacaaaaaaatccaaatgagactaaaaaaatcccacttaactttgttgcttatacttacggttattttgagagtgacaaaataataaaacaatcagattttttgaaattcttacaaagatggggttttaagacaaatgaacacaataaaattttaaacagcatagatgatttaataaattttcataaaaaatttgaaaaagaaagatttgatttagagtatgatgttgatggtttagtttataaaataaatagtctcgaacttcaaaaaagattaggatttactgcaaattcccctagatgggctattgctcataaattttcagcagatagcgcattttctcaaataatagatataaatattcaggtcggccgaacaggtgctttaacacctgtagcaagaatcaaaccagtaaatattggaggtgtagtggtttctaatgcaacactccataatgaagatgaaattattagaaaagatataagaattagtgatactgtaaaaattgagagagcaggtgatgttattcctcatgttgtttcagttgatcttaaaaaaagaaaaaaaagttcaaaaaaatttgtttttccaaaaaaatgtccttgtggttttgatacaacaaaggaaatttaat

SEQ ID NO: 319890 - DNA, 844 bp, Unknown
  Bacterial polypeptide expressing nucleotide sequence isolated from the Sargasso Sea
gtttcagctggtacaagaggtgatggttttacaggtgaaaatgtattagaaaatataagtcgaattaaagaaattccattaaatttaaataaaaattatccagatctaatagaaattagaggtgaaatttatataaataaaatagattttgaaattataaacaaaaatttaaatacaaaagataaatttgcaaatcctagaaatgccgctgctggaagtttaagacagttagatacttcaatcagtcataatagaccgctaagatttattgcacatggtattggatttagctctaaattatataaaaatattcaagacttttatcaagatttgaataaatggaaaattccaactaataaatttttaaaattttgtttatcagctgatgaagtaatgaatcattataatttaataaatcaaaaaagagctgatatagaatttgatatagatggtttagttataaaaatagataatatagaacttcagaaaagactgggttatgtaggcaaaaatccaagatgggcgatagcattaaaattttcagcagaaaaagcagagacaactattttggacatagattttcaagtaggaaggacaggagcaattactcccgtagctagactgaaaccagtaaatattggtggagtgattgtatctaatgtatcattgcataattttgatgaaatagataaaaaaaatataaatataagagatatagtagagatagaaagagcaggggatgttatacctcatgtcacaaaattagtttccaaaaaaagtaatattaataataaaattttccctccaaaaggtttgtccaagattgcaaaggtaaaaacaatca

SEQ ID NO: 319891 - DNA, 733 bp, Unknown
  Bacterial polypeptide expressing nucleotide sequence isolated from the Sargasso Sea
agaactattaatgatcataactacaattattacgtgctggataatccaatcatatcggacatcgagtacgatactttgctcagggaattggatacgcttgaaacgaagcgacctgatctaattactactgattcccctactcaaagagtaggcgcagcaccgctagcagcatttacatctgtggagcacagtattccgatgctgtcacttgaaaatgcaatgaatagtgacgaattgattgcctattatgaccgtacaaaaaaagggcttggtgaaattagagatattcaatttgttgcagagccaaagctggatggcattggagtagaacttatatatcaagacggctcgttgattcgtgggcttacacgtggtgatggtacaatgggtgaagatattacccaaaatattaaaaccattcgttccataccgctagcacttagaaacgataaaagaaatttcccaaaccttcttgaagttcgaggtgaggtctttatgttaaaaaaggattttcaaaagttgaatatagcaagagaaaataacaacgaaccgctatttgcaaacccaagaaatgcggcggctggaagtttaagacagcttgatccatccattaccgctaaaagaccgctatctatcttttgctacgaagctggaaatattactggtgacgccttttcatcgcataaggactttttatctgcattagctgaatggggatttcctggaacagcga

SEQ ID NO: 319892 - DNA, 942 bp, Unknown
  Bacterial polypeptide expressing nucleotide sequence isolated from the Sargasso Sea
gttaaataaacacaacaaattatactataataaaagtaaaccgattatttcagattctgaatatgataatttgaaattagacatattaaatttagaacaaaaatataaatatttaaaaagcgtaaaatcaccaagtaaaattgttggtcacaagccttcaaaattatttgaaaaatatcaacataaagtacctatgctgtctttatcaaatgcttttgatgaaaatgatctattaaatttcgaaaaaaaaatttttaattatttaaataaaaagataaaattaaattacagtgttgaacctaaaattgatggtatttcagcctcacttacatacattgataaaaaattaaaatttggtgtttctagaggagatggagaagtaggagaactaataactgaaaatttaaaaactataaaagatataccattagaaataaaaaataaggactttccaaacgaaattgaaataagaggagaagtttttataaaaaaaaatgatttctttaaaataaaagacaaatttgccaatcctagaaatgctgcatccggctctctaagacaaaagaacccattagaaacaaaaaaaattccacttaattttatagcttatacatttggttattcgaggaaatatttaaaaaaacgtcagtcagattttttaaatgatttaaaaaaatggggttttaaaatcaatattgataataaaattttgaattcaattgatgaattgttgaaattccataaaagctttgaggcaaaacgatttgacttagactacgatttggatggcttggtatataaagtaaatgattttgatttacaaagtagacttggatttacgtctaattcaccaagatgggcaatcgcacataaattttctgcagatagtgctaacacgaaagttattaaaatagaaatacaagtaggaagaacaggagcatt

SEQ ID NO: 319893 - DNA, 719 bp, Unknown
  Bacterial polypeptide expressing nucleotide sequence isolated from the Sargasso Sea
atatgataagttggtaaaagaatatcttgaattagaaataaaatttcctgatataaaattaaaatcaaacccaataagtaaaattggtggtaaaattaataataagtttagtaaatcagaacatttatccccaatgtactctcttgcaaatggttttaatgagaatgatttattggagtttgatgaaagaattaaaaaatatttaaatttagaaattaaagaaaaactggagtatatttgtgagccaaaaatagatggcttgtcacttaatctcacttataaaaatggcaatttatttagtgcagcaacaagaggagatggatttataggtgaagatgttacgaataatataagaaatataaaaaatattcctcagaaactaaattacaaatttccaaatttattagaaataagaggagaggtatttataaataaatcagattttgaaaaaataaacttaaagttaaatgataaaaataaatttgcaaacccaagaaatgcggctgccggcagtttacgacaacttgattatagtatttctcattcaagaccattaaagttcttggctcatggattaggtctatcttcacaaaactttgtaaaatttgataatttttataaatgtattgaaaattttggaataaaaagaaatttattaagtattaaaacatctagcttaaaaaaaatatttgaattttatcaaaaaattaatgctcaaa

SEQ ID NO: 319894 - DNA, 436 bp, Unknown
  Bacterial polypeptide expressing nucleotide sequence isolated from the Sargasso Sea
atacgaggtgaagtttttattgggaataaagattttgaaaaaataaaaaataagtttgctaaccctagaaatgctgcatcaggttccttaagacaaaaaaatccaaatgataccaaaaaaattcccctcaaatttatagcttatacatttggttatgaaaaaggaatgaaagtccaaaaacaaaatgaatatttacaaaagttaacagattggggatttaaaacaaatccattcaataaaactttaaaaggtgttcaaaatttaatgtataattattatgaaattgagaaaaaaagaaatgagattgattttgatattgatgggattgtttataaaataaatgattttaatttacaaaaacgtcttggaaatgttgctaactcaccacgttgggctatagctcacaaattttctgccaataagggtatttccaaaa

SEQ ID NO: 319895 - DNA, 731 bp, Unknown
  Bacterial polypeptide expressing nucleotide sequence isolated from the Sargasso Sea
tccaaataaaatttcagaaaaaaattttccagaggaaatagatataagaggtgaagtttttataagaaattctgattttaaaaaactatctaataaatttgcaaatccgagaaacgcagcttcaggctctttaagacaaaaaaacccaggcgagacaaaaaaaattccattaaagtttattgcttatacttttggttttcaaaaaaatatgcaaattaaatcacaaactgaatttcttaaaaatttggataaatggggctttaaagtaaatccatttaataaaaaaattactagtattgaaaatttattagaaaattataaatctttagaacataaacgagatgaaatagattttgatattgatggtatagtttataaagttaataattttgaattgcaaagaagattaggaaatgtagctaatgcacctcgttgggcaatagctcataaattttcagctaacagtggtgtatcaaaaattttgaatatagagatacaaataggaaggactggagcactaacacctgtcgcaaaaataaaaccaattaatataggcggcgtgatagtttccaatgcaacgttacacaacgaggatgaaataaaaagaaaagatattagaataggtgatatcgctactattgaaagagctggggatgtcataccacatattacttctattgaagttaaaaaaagaggtaaaaattcaaaaaaatttatatttccaactaatt

SEQ ID NO: 319896 - DNA, 792 bp, Unknown
  Bacterial polypeptide expressing nucleotide sequence isolated from the Sargasso Sea
agaacctaagattgatggtatttctgcctccttaatttttaaaaaggggaaatttataatgggactttccagaggtgatgggaaagtaggagaagatattacaaataatttaatgacaattgatgatattcctaaaaacatttcagctgaaaattttcctgatgaaatagatattcggggtgaagtatttattcaaaataatgattttgaaaatcttaaagacaagtttgctaacccaagaaatgctgcatccggatcattacgacaaaaaaaccctcaagatacaaagaaaattcctttaaagtttatcgcttatacatttgggtatgtgaataatatggaaataaaaaatcaaagcaactacttgcaacaattaagtaagtggggttttaaaacaaatccatttaataaaactattaaaggtattaaaaatttaatgaaaaattactatgaaatagaaaaaaaaagaaatgagattgattttgacattgatggtattgtttacaaaataaatagttttgatttacagaaacgtttaggcaacgttgcaaattcacctcgttgggctattgcgcacaagttttctgctaataaaggcacgtcaaagatcttaaatattgagattcaagtcggtaggacaggagcattaacacctgttgcaaaaataaaaccaattaatattggtggtgtagttgtatcaaatgcaacacttcataatgaagatgaaataataagaaaagatataaggataggagatatagttatagttgagagagctggagatgttattcc

SEQ ID NO: 319897 - DNA, 589 bp, Unknown
  Bacterial polypeptide expressing nucleotide sequence isolated from the Sargasso Sea
ctgaaggacttgcgtgctcaggtgaatgagcataattatcggtattatgttgcggacgcaccaacgatcgcggacgttgagtacgatcgcttgctgcgggacatcggagacctagaggcagcgcacccggagttaatcacacccgactcacccacgcagcgggttggctgtaaaccggatacggctttttcaagcgtagcgcatcgggtgccgatgttatcgctatccaatgtgttcacgcctgaggatctggcgttgttttttagtcgcatacaacaaaaaattcctcatgcggtggattgcgaggtgttgtgtgaaccgaaattagacggcttggcggtgacgttaatttatgttgatggccagttggtcaccgcggcgacacgcggcgatggtcaggtgggtgagaacatcacgttaaatgcgcgtacgattaaatcagttccgttggtgctgcgtggtactgggtatccgcagcgcttagaggtgcgcggtgaagtgtttatgatgaaagcgggttttgatcaattgaatcaactggcattacagcgtgaggaaaaaacctttgcgaatccacgtaacgcggcgg

SEQ ID NO: 319898 - DNA, 897 bp, Unknown
  Bacterial polypeptide expressing nucleotide sequence isolated from the Sargasso Sea
aaaaaaataattaattttttaagcttaaaaaaatcagctgaaattgaatatagtgcagaaccaaaaattgatggaatttctgcttctttgatttacaaaaaagggatatttgttcaaggactttcaagaggagatggaagagagggagaagatataacagaaaatctaaaaactattaatgatataccaaaaaaaatttcttctaaaaattttccaatcgaaattgatattcgaggagaagtatttataaaaaataatgatttcaatattataaaagacaaatttgctaatcctagaaatgctgcttctggctctttaagacaaaaagatccaagagttacaaaaaaaataccactaaaatttattgcctacacatttggttatgctgaaaaattaagtattaattcacagtcagattttttaaaaaacttaaaacattggggatttaaaataaatcaatttaacaaagtaataaaaggagttgataatttaattttaaatcataaaaatttagaagaaaaaagaaaatccattgattttgatattgatgggattgtttataaaataaataattttgatttacaaaaaagacttggctttgtaacaaatgcacctagatgggcaattgcacataaatttttggcaaatagctctatttcagaaataataaatattgaaattcaagtgggaagaactggtgctttaactccagtagcaaaaataaagcctacaaatattggaggagtaaccgtttcaaatgcaacactgcacaatgaagatgaaataattagaaaagatataagaattggggatacggtaactattgaaagagcaggagatgtaatacccacatgtaatttctgtcgacttaaaaaaacgaaaaaaaaatcaaaaaaa

SEQ ID NO: 319899 - DNA, 844 bp, Unknown
  Bacterial polypeptide expressing nucleotide sequence isolated from the Sargasso Sea
aaaaattatggaagtaaaataaaagataatttcaaaaaaataaaacatgactcacaaatgtattcgcttgctaatgcttttgataataatgacattcatgattttataaagcgttcagttaaatttttaaatttagaaaatgatgatgatttccaatatatttgtgaaccaaaaattgatggcttatctttaaatcttgtgtacaaaaaaggaaatttgatttcagcaggtactagaggagatggatttataggagaagatgttactgaaaatattttaaatatcaaaaatattccttctaaattaaaaataaactttccagattttattgaaattagaggagaagtatttttaaataaaagtgattttgagaaactcaattctaaattagaagataaatctaaatttgcaaatccaagaaatgctgcagcaggaagtctaagacagcttgatattgcaattagtcatagtagaccattacaattcatccctcatggtattggtaaatgttctgaaaattttgaaaatattgagaattattatgatcaattaaaaaattggaaaattatacctaatgatctatgcaaaaaatttcaatcagttaaagaaattattaaattttataatcaaataaatcaaaaacgatctagtattaactatgatattgatggattagttgtaaaaataaatagttttaaactacaagaaagactaggttatgtcggaaaaaacccaagatgggcaattgccataaagttttctgctgaaaaagctaacactataattaaatctgtagattaccaagttgggagaactggtgctattacccctgtagcaagatgca

SEQ ID NO: 319900 - DNA, 609 bp, Unknown
  Bacterial polypeptide expressing nucleotide sequence isolated from the Sargasso Sea
taatgaacatcgaaaaattataaactcagtcgtagaaattgctgattattatgcttattggacagaaatgcgaaattcacttaactacgatacggacggtatagtaatcaaggtagattcctaccaaaaacaaaatgtattaggagctgttgcaagagaaccacgttgggcaatagcttacaaatacccagcaaagacagaaataacaaaattaattcaaattggcataaatgtaggacgaaccggtagtttaaacccttttgcagaattagatcctatagcaattggtggagtaactgttaagaatgcaacattgcataattatgaagatattcaaaaaaaagatattcgtgttaatgactttgtatatatacgtcgttcaggtgatgtcatacctcaaatattaggtcctgttttagaaaaaaggacaggaaatgaacaagtctttacaatgcctactgaatgtccttcatgtaactcccaaatatataaatactccgatgatgttaattattactgtatcaattcagaatgccctgatcaatttgaaaatcatttaatccattttgtaagtaaaaattgtatggatattagaggactaggtgaaga

SEQ ID NO: 319901 - DNA, 856 bp, Unknown
  Bacterial polypeptide expressing nucleotide sequence isolated from the Sargasso Sea
attgatggtatttcagcttctttaacatataaaggcggaaaatttgaaaaaggtttatctcgtggtgatggaaaagaaggtgaggatataaccgcaaatcttgcaacaattaaagatattccaaaagttattcaatctgaggattttcctgaggaaatagatataagaggtgaagtttttattaaaaatactgattttgataatttaaaagagaaatttgcaaacccaagaaatgctgcttctggatctttaagacaaaaaaatccagatgatacaaaaaaaattcctttaaaatttattgcatatacctttggttatgaaaaaggtttattagcaaataatcaatttgattatcttaataaattgaaagaatggggttttaaaacaaatccattaaacagattaatttctggaacaaaaaatttaattaaaaactatattgtagttgaaaaacaaagatctagcttagaatttgatatagatggtattgtttataaaattaatgattttgctcttcaaaagagattgggcaatgtagcaaatgctccaagatgggctatagctcataaattttcttcaaataaagctacatctataattttagatatagaaatccaagttggaagaactggagctttaacccctgttgctaaaattaaaccaattaatattggaggagtcgtagtttccaacgcaactttgcataatgaagacgaaattaatagaaaggatataagagttggtgatactgttacagttgaaagagcaggggatgtgattccacatattttgtcagttgatataaataaaagaccaaaaaaaagtatcaaatttatttttccagataaatgtcctt

SEQ ID NO: 319902 - DNA, 832 bp, Unknown
  Bacterial polypeptide expressing nucleotide sequence isolated from the Sargasso Sea
gtggcagttaatttactatatgaagaaggtaaacttattaaagcatccacaagaggggatggcaagattggagaagatattactcacaacataaagactataaaaacaatacccctttctcttataggtgctaattttcctaataccttggaggtaagaggcgaagtatttatagaaaaagatgacttttatcagattaatcaggaagcaaaagagaaagaggagaaagtttttgcaaatccaagaaatgcagcagcaggtagtttgaggcaattagatccttctataacttctaatagaccgttaaaggtatttgtctacggatttggaattttggagggtaaagatcttccgaataatcaatatgatatgttatctctggtatctgagtgggggtttccagtaaattccgaaaccaaactttgtagatctttaaaagaaagcattgattattttgagtttataagttctaaaagagataagctggcttatgagattgatggagtggtctataaggttaatgaatttgatttacagaaaaaattaggtcaaatttcaagagcaccaaggtgggcaattgctagaaaatttcctgcggaagttggcagaactttattaaaaaagataagtttccaggttggaagactaggctcaattactccagtagctgaattagatccagttatagtagggggagtaacaatatcaaatgcaagcttacataattttgatgaagttgagagattagatgtaagagaaggcgattatgtctttgtaaaacgtgctggagatgttattcctcacaataatagaagtagatcaatcaactaga

SEQ ID NO: 319903 - DNA, 772 bp, Unknown
  Bacterial polypeptide expressing nucleotide sequence isolated from the Sargasso Sea
agaagatgtaactaaaaatattttaaatataaaaaatatacctaaaaaattaaaaggtaaatttcctagttttatagaaataagaggtgaggtctttctaacaaaaaaagattttgaaaatattaactcaaaattagatattaaaaataaatttgcaaatccacgaaatgcagctgcaggaagtttacggcagcttgacgtaaacataagtaaatcaagaccattacagtttttagcccatggtataggatattcatcctatgaatttagttattttgatgagtattatgaaaatttagaaaattggggaattaaaaaaaataatataaaccttaaagcgtcaaatctgaattcaattttgcaattttataatagaataaatgaatctagaagtaatttagattacgatatcgatggtctggtaattaaattaaataatatattaaatcaaaaaagacttggaaatgttggtaaaaatccaagatgggcaattgctctaaaattctctgcagaaaaggctaaaacaataatagaggacattgattttcaagttggtagaacaggatcaataactccagtagcgagattacaaagtattaatttaggaggtgtaattatttcaaatgcaaccctccacaattttgatgaaattaaaaaaaagaatattcaaattggtgataaagttgaaattcaaagagcaggagatgtaataccgcaggttattaaagtaataaaaaaagctaacaaagttaacaaactaattattccacca

SEQ ID NO: 319904 - DNA, 466 bp, Unknown
  Bacterial polypeptide expressing nucleotide sequence isolated from the Sargasso Sea
atggctgagcaacagcagcgggccgcggaactgcggtccctgctcaaccgagctgcccacgcctattacgtcctcgatgtcccggtcatggaggacacggtctacgaccggctctaccgggagctgcaacagctggagcaggccgatccgagcttgctcactgccgacagtcccacccaacgggtgggaggccctccggcgacgggcttccacagcgtcgaacaccggatcccactgcaaagcctcgataacgcctttgatcagggggaattgaaggcctggcatcaacgcctgctcaagctgctggatcgccctgacgacagcgctttacccctggtgggagaactcaagattgacggcaatgccctggccctgagctaccgccagggggtgctggagcgggcggccacccgcggtgatggcagcagcggtgaggagatcaccgccaaatgtgcgcaccatcagt

SEQ ID NO: 319905 - DNA, 796 bp, Unknown
  Bacterial polypeptide expressing nucleotide sequence isolated from the Sargasso Sea
tcaaaataataatttaaatatttcttatactgcagagcctaaaatagatggtatctcagcctcattgacatatagaaaagggaaattaattagaggattatcaagaggagacggtaaagaaggagaagatataacttctaatcttgaaacaataaaagatattcctaaaattattctatctaaagattttccagaagaaattgatgttagaggtgaagtttttattacaaatagtgactttaataatttaaaagcaaaatttgcaaatccaagaaatgctgcatcaggttctttaagacaaaaaaatccagaagatacaaaaaagatacctttaaaatttattgcttatacttttggttttgaaaaaggcttaaaaataaataatcaatttgaataccttaagaaattaagtgaatggggatttaaaacgaatcctttgaatagattgatttctggagtaaaaaatttagttaaaaactataatgatgtggaaaaaaaaagatcaaacttagattttgatattgatggcattgtttacaagataaatgactttgctttacaaaaaagattaggatatgtgggtaatgcaccaagatgggcaatcgctcataaattttcatcaaataaagccatatctgaaattttagatattgatattcaaattggaagaacaggagctttgacaccagttgcaaaaattaaaccaattaatattggaggagtattggtttcaaatgcaacattgcataatgaagatgaaataaatcgaaaagatataagaattggagatacagta

SEQ ID NO: 319906 - DNA, 732 bp, Unknown
  Bacterial polypeptide expressing nucleotide sequence isolated from the Sargasso Sea
ttttagagaactacaagaattagaaacaaataacccaagcttaattgataaaaactcaccaacacaaagggttggtgcaaagcccttaaaaggctttaaaaccgcagctcatcgaataccaatgttatctctttcaaatgcaatgaatgaagatgaattaattttatttaatgaacggataaaaaaacttttagagacaacacataaaattgaatacatggcagaaccaaaattagatggaatcggtgttgaactaatatatcaggatggcatacttattaaagggcttactagaggcgatggttttgaaggtgaagatataacacaaaatgttagaacaataaaatcattacctttgaaacttttaggtaaccgctttccaagtttattagaagtgcgaggtgaggtatttattaaaataagtgattttgacaaattaaatgaaaaccaattagagagagggttgcaggtttttgcaaacccaaggaatgctgcagctggtagtctgagacaacttgaccctagaataacttcaagcaggccactatcaataaattgttatgaaccaggtgtaattgaagataaaaactttaagacgcatcaagaatttttattctacataaaaaatcttgggctaccagtaaatagtatgataaaaaaagttagtggtgctaaaaatgttataaaatatcataatactttagaattgaaacgtaatgaacttaattatga

SEQ ID NO: 319907 - DNA, 778 bp, Unknown
  Bacterial polypeptide expressing nucleotide sequence isolated from the Sargasso Sea
tagttttcaatatatatgtgagcctaaaattgatggattgtctttaaatcttgtatataaaaatggaaagttagtttccgctggtacaagaggagatggatttattggagaagatgttactgaaaatattttaaatataaaaaatattccatcaaaattaaaaaaaaactttccagattttattgaaattagaggagaggtattcttaactaagagtgattttgagaaacttaattctaaattagaaattaaatctaaatttgcaaatccaagaaatgctgctgctggcagccttagacaacttgatacttctattagtcatagtaggccgctaaaattcatacctcatggtattggcaaatgttcttacaaatttgacgaaattgagaattattatgatcaactaaaagattggaacattttgccaaataaactaagtaaaaaatgttactcagttgaagaaattattaaattttataatcaaataaatttcaaacgatcaggtattgattatgatatcgatggactagttgtaaaaataaatagttttaaactacaagaaagattaggctatgtaggaaaaaatccaagatgggcaattgctataaagttttctgctgagaaggctaatacaataattcaatctgttgattatcaagttgggagaactggtgcgattactcctgttgctagattgcaacctgttaatttaggtggtgtaataatatcaaatgcttcgttacataattttgatgaaataaagaaaaaaaatataaat

SEQ ID NO: 319908 - DNA, 855 bp, Unknown
  Bacterial polypeptide expressing nucleotide sequence isolated from the Sargasso Sea
aggtaagccctctgaattattttcaaaatttaatcaccctacaagaatgctttcacttgataatgcaatgtcagaagatgacttagtaaattttcaaaaaaaaatatctaatttcctcaacaaaaaaactattgattttgaattttctacagagcctaaaattgacgggttatcagttaatttgatttataaaaatggcaaacttgttatagctgcaacaagaggcgatggtcagacaggagaaaatattacaaataatgtaattacaatcaaggatatcccaaaactcttaaaaacaaaatctccaccaacctccattgaaattagaggtgaaatatttatcactaaagaagattttataaaacttaacacagaaaataattttgctaacccaagaaatgctgcagctggcagtctaagacaattagacccaaaagaaactgcaaagcgccctcttaaatttattgcacacggttttggttcatttaatggagaaaagaaaaattactatgatcaattaattgaattaaagtcctggggaattccaattagtccatttctcaaaaaagttcaaaatttaaatgagttaatgacaatatatggtgaaattaacaaaaaaagagcagagataccctacgatattgatggacttgtatacaaagtaaataatttatcttttcaaaataggttgggaattgtcggtaaatcacctcgatgggccatagcacacaagtttgcgtcagaaactgctcaaactgaaatcaaaaaaatagatattcaagttggaagaactggctcgttaacaccggttgcaagattgaaaccaataaatattggtggtgtattggtttcaaa

SEQ ID NO: 319909 - DNA, 937 bp, Unknown
  Bacterial polypeptide expressing nucleotide sequence isolated from the Sargasso Sea
aaatattaaacaagattatcaaaaaaaaatagatgaattaaaaaaacataataaattttattatgaaaacagttccccagaaatttctgataaagagtacgataaattaaaaaggcaaatattaaatttagaaaaggaacatgcatatttaaaaagtaatttttctccatcaaaaatagtaggatttaagccatcaaaaaattttgccaagtataagcatcgagaaaaaatgttatctttatcgaatgcatttgatgaagaggatctaattaattttgaaaaaaaaatatttaattttttaaatgaaaaagctgatttaaactacagcgtggaacctaaaattgatggaatttctgcatccctaacatataaaaatgggtttcttatttacggagtatcaaggggcgatggaacagaaggagaaataattacagaaaatttaaaaactattaaggatattcctcataaggttacaaacatcaattttcctaaagatatcgaaataagaggagaggtttacataaacaaagatgactttcaaaaaattaaagcaagctttgctaaccctagaaatgcagcttcaggctctcttagacaaaaagattcaaaagaaacaagtaaaattccactaaaatttattgcttatacattcggctttatgagtgaaaataaatttaaaaatcaatctgactttttaaaagagttaaaatcgtggggatttttaacaagtgagtacaatgaagttattaaaagtattaatgggttagtgaactttcaccagcaatttgaaaaaaaaaggtttgatttaaaatatgatattgatggtctagtttataaagtaaataacatacagttacaaagaagattaggctttacctctaatgcccctagatgggcaattgcacataaattttctgcagatcatgcttattcagaa

SEQ ID NO: 319910 - DNA, 784 bp, Unknown
  Bacterial polypeptide expressing nucleotide sequence isolated from the Sargasso Sea
cacagagtaaaaatgttgtcattgtccaatgcttttgatttaaatgatttagaaaattttgagaaaaaaatatttaattacttgaataataaagtagatattgaatatagtgttgagcctaaaatagatggaatttcagcttcattaacttacaaaaatggatttttagttatgggtacttcaagaggagatggttctacaggtgaagtaattactgaaaatttaaaaaccattaatgatatacctcataaaatagctaataaagatttcccaaaagatatagatattagaggtgaagtttttatagaaaaagaagattttaataagttaaaaaataattttgctaatcctagaaatgcagcatcaggctctcttagacaaaaaaatccattagaaacaaaaaaaattccacttaaatttatagcttacacttttggttattttaaaagtgataaaataaaaaaacagtctgattttttaagttcgttgaaaaaatggggttttaaaacaaatgatcataataaagtattaaaaactattaaagatttagaaaattttcacaaaaaatttgagaatgataggtatgatttaaaatatgatgttgatggtttagtttataagattaacagtcttgatcttcaaaacagattgggatttacagcaaattctccaaggtgggctattgctcataaattttcagcagatagtgcattttcaataataaaagacataaacattcaggttggtagaacaggcgcattgacccctgtagcaagaataaaac

SEQ ID NO: 319911 - DNA, 924 bp, Unknown
  Bacterial polypeptide expressing nucleotide sequence isolated from the Sargasso Sea
ccttcgaatacatttgtgaactaaaatatgatggagtagccataagtttaatttatgaaaatggtcaattatttaagggtgtaactagaggagatggagtaaggggagaagtagttaccaataacattagaacaattcaagctatcccccttaaattagttggtgatttccctgaaaaaattgaagttagaggggaaattatttttccaactcctgcttttgaggaacttaataatcaaagaaaattaactggacttccgttattttcaaatcctagaaatacagcatctggctctctaaaattacaagattcagcagaagtagctaaaaggaatttagattgctttttatatgcagtttacatgaaggattccatatttaataatgcatctgatcaatataattatttacaacaattaggttttaagacaccatcagtaaaggatagatatattcaaaaggcatctagtatagataatattatggattttattaattattgggatgataaaagaaatgcacttccttttgaaattgatggaatagtaattaaggttaatcaacttgatttacaacaagaaattggacatacagcaaaatcaccaaggtgggcaattgcatataagtatagagctcaacaagtttctacaattttagagaatatagtttatcaagttggaaggacaggggcaattacacctgtagctcatttaagccctgttgaaataagtggaacaattgttaagagggcaagcgtacacaacgaagatcaaattcaaaaactagatttgagaattggggacacggtctttgtagagaaaggtggagaaataattccaaagattgtaggggtagataaatcaaaaagaagttccattagcgaatcattcaatttcattgaaaattgtccagaatgtaaatagt

SEQ ID NO: 319912 - DNA, 838 bp, Unknown
  Bacterial polypeptide expressing nucleotide sequence isolated from the Sargasso Sea
gagcctaaaatagatgggatatctgcaacactaatctatgaaaatggagttttgactaaaggcttatcaagaggagatggtattgccggtgaggacattttaaataatcttaaaacaattaaatcaatccccaaaaaaataacagataataatgttccgtcattgatcgaaatcagatgtgagatttttataggtaaaaaagattttaatcttattaaagggaattttgcaaatcctagaaatgctgcaggaggatcgttgagacaaaaaaactctaaagaaacagcaaaaattcctcttcaatattttgcttacggacttggagctaacgagtcaattgaacttaaaactcaatctgaatttttaaataaaattaagaaatggggatttaaaacaaatcctttagtaaaaatagtaaaaaacttaaatgaaattcaaagtcaatattctttaattgattcaaaaagagcatctctagactatgatattgatgggttagttttaaaagtaaatgatttaaaactacaattaagattaggcaatacatcaaactctccaagatgggcaattgcatataaattttcttctgaaaaggcatttactaaaattaaagatataataattcaagttggcagaacaggtgctattacaccagtcgcaaaagtagagccagtgaccgttggtggagtagttgtttctaatgcaactttacacaatgaggatgaaataaaaaggaaagatataagagttgaagatattgtccaaatccaaagagcaggagatgtaataccacaaagttgttactgtagatattcaaaaagaaaaaaaagcagtaaaa

SEQ ID NO: 319913 - DNA, 832 bp, Unknown
  Bacterial polypeptide expressing nucleotide sequence isolated from the Sargasso Sea
atgaatttagaaaaagctagaagggaagctgaaaaactccgaaaaataattttacagcataattatcaatattatgttatggatgatcctgaaatttccgatactgaatatgatattttatttaaaaaattaattaaaattgagcaagaataccctaaattaagaactccaaactctccaacacaaagagtcggtgctgaaccattatcagagtttgatgaagtaaagcacgcaattccaatgctatcattagctaatgcatttgatgaaaaagaaatgactcgtttttatgagcgattaatgggtgaattagatattaaagatttagtatttactggcgaaccaaaatttgatggattagccgttagtattttttataggaatgctaatttagaaatatcagctacaaggggagatggttatattggtgaaaatataactcagaatattagaacaatatcacaagttccgttaactctaattggcctcaatattcccgataaattagaagtgagaggagaagtatttattactaacaaagatttttctaatttaaatatccggcaaaaaagagataatcaaaaaatttttgcaaatccaagaaatgctgcagctggtagtttacgtcagcttgatcctaagataactgctaagagaccactatcgttttgtgcatatgggataggtgaatataagggaggcgtcaaattaactgaccatgcgcaagtattgaatcaacttaaacattggggactacctatttcatctgaatttaaagtactaaaaggattgccgatgtgtttgagatattataaacaaattggtagataaa

SEQ ID NO: 319914 - DNA, 1275 bp, Unknown
  Bacterial polypeptide expressing nucleotide sequence isolated from the Sargasso Sea
tttcgaaaaacgtttaaaagacagactgaaagattcatcaacgctagactttagctgcgagccaaagctagatggtttagcggtaagtattttgtacgaaaatggtgaattagtgcgtgctgcaacacgtggtgacggccaggtaggtgagaatatcactgctaacgtgcgcaccatctcaaacgtgccgttaacgcttcgtggtgagcattatcctgagcgcgtagaagtgcgcggtgaagtgtttatgcctcgtgatggctttgcaaaactcaacgaacatcaaaaagaaacgggtggtaaggtttttgccaaccctcgtaatgctgcggccgggagtttacgacagttagactctaaaattacggccaaacgcccactgatgttttatgcctactcgctaggcgtagtgcaaccagaaagttttgagctgcccacaacacatagcgagcgccttaagcagttgggtaattgggggctgccgctgtgccctgatatcgataccgccgagggcggtaagggctgcttggcgtactacaaccacattttggaaaagcgcgataatttgccgtatgacattgatggcgttgtgtttaaggtcaaccgtattgacctgcaaaatgcccttggatttgttgctcgagcgcctcgctgggcaattgcgcagaagtttcctgcgcaagaagaagtgactaagttactggacgttgagtttcaggtaggaaggactggtgcgatcacgccggttgcccgcttagagcctgtgtttgttggcggagtaacagtatcaaatgctacgcttcacaatcaggacgaaatttccagattaggcgtaaaagttggcgacaccgtggtaattcgacgtgcgggtgacgtaattcctcaagtggtatctgtggtagaagctgatcgcacaggtagcgaaactgatattacttttcctagccaatgcccggtgtgtgactcgcagattgaaaaactagaagacgaagcggtcgctcgttgcaccggtgggctaatttgtgcagcacaacgcaagcaggcgctcaagcattttgcttcgcgcaaagcatttgatatcgatggcttgggcgacaagttagttgatcagttagttgacgctgatcttgtgcacagtcccgccgacttttttacactgtctttaggtgatgttgtcggactagaacgtatggccgaaaagtctgccagcaagctactggcatcacttgaagcttcaaagcaaaccacgctttgccaagttctttatgcgttggg

SEQ ID NO: 319915 - DNA, 1161 bp, Unknown
  Bacterial polypeptide expressing nucleotide sequence isolated from the Sargasso Sea
gatgatgcagaaaaatgaaataaaaaaaaaatattctaataaaattaaagaattaaataagcataacttgctttattatgaaaaaagcaaaccaataatttctgacaaagactacgataaattaaagaaagaaatatttgagttagaaaagaaatattctttcttaatatcagatatttcaccttctaatacagtaggattcaaaccatcaaaaaattttgtaaaagcagttcatagggaaaggatgctctcactttcaaacgcatttgacaaaaatgatttagaaaattttgaaaaaagagtttttaactatttaaatattaaagataaaaaaattttagaatatagtgttgaaccaaaaatagatgggatttcagcatcattaacttataaaaataataatttagttttaggtttatcaagaggagatggcacagaaggcgaagtgattactgaaaacttaaaaacaattaaagatattcccaagtttattgaagatataaaatttccaaaagatatagatataagaggcgaagtttacattgaaaaagatgactttgaaaatattaaagatcgatttgcaaatcctaggaatgcggcatcaggatctcttaggcaaaaaaatccaagtgaaacaaaaaaaattccacttagattcattgcttattcattcggatttaataataaaatcaattttaaaaaacaatcagaatttttacaacttcttaaaaattggggttttaaaacaaataaatttaataaagtcgttagtggtgtagacaatttagttcaggtgcacaaagaattagaaaaaaatagatacgatttagattttgatgtagatggattggtatataagataaacaatctagaactccaaaatagattgggttttgtagcaaatgctcctaggtgggcaattgcacataaattttcagcggatagttcattttcgaaaatactaaatattgagattcaaataggaaggactggagctttaacaccagttgccaaggttaaaccagttaatataggaggtgttctagtttccaacgcaactcttcataatgaagaaagaataactagaaaagatataagagttggagatacagttaaaatagaaagagcgggcgatgttataccacatgtgcttttagtaga

SEQ ID NO: 319916 - DNA, 979 bp, Unknown
  Bacterial polypeptide expressing nucleotide sequence isolated from the Sargasso Sea
atgaaggaagcagaaataaaaaaatactataagaaaaaaataaatgaattaaaaaatcataacaaattatattttgaaaaaagttcgccaaaaatatctgataaagaatatgatgaaattaaaaaagaaatacttgatttagaaaataaattttcttttttaaagagttcttcttctccatccaattctctaggatttgctccctcaaaaaatttcataaaatctactcacagagtaaaaatgttatctttatcaaatgcttttggcataaaggatttagaaaatttcgaaaagaaaatatttaattatctcaacaagagaattgatattgaatacagtgttgaaccgaaaatagatggaatttcagcgtcattaacttacaaaaatggattattagtcatgggtacttcaaggggagatggtactacaggtgaagtaattactgaaaatttaaaaacaattaatgatataccgcataaaataactaataaagacttcccaaaagatatagatattagaggcgaggttttcatagaaaaggatgattttaaaaagttaaaaaatgatttcgctaatcctagaaatgcagcatcaggttccctgagacaaaaaaatccattagaaacaaaaaaaattccacttaactttgttgcttatacttatggttactttgaaaataataaaataaagaaacagtctgattttttaatatcgttgaaaaaatggggttttaaaataaatgagcataataaggtttttaaaactattaaagatttagaaatttttcacaaacaatttgagaatgatagatttaatttaaagtatgatgttgatggtttagtctataaaattaataatcttgatcttcaaaatagattaggatttacagcaaattctcccaggtgggctatagctcataaattttcagcagatagtgcatattctttaataaaagacataaatattcaggttggtagaa

SEQ ID NO: 319917 - DNA, 805 bp, Unknown
  Bacterial polypeptide expressing nucleotide sequence isolated from the Sargasso Sea
aatgaaagacttattaaagaaatacgaacaacttaaagaggaaattcagctacacaattataattatcatgcgctagatgatccaaaaatatcagatagtgagtatgataatctctttcgaagcttgcttgatttagaagaagaaaatcctcatcttgtaacttcagattctcctacacagcgggtaggattttctccaatagatgaatttgaaacatttgagcattcggtaccaatgctttctttggctaatgtatttagtgaaaaagaatttttagatttccatgaccgtattttaaaacgtcttgtaaatattgatgattttgagtacttctgtgagcctaagatggatggagcagcagtatcactaatttacaaagatggcatactacaaagggctgtaacaagaggagatggcagagttggtgaagatatctcccaaaatgttaagacgattagatcaattcctcaaaaattatcatcttctaaagctaatgttccctcattattggtaataagaggggagatatttatttcaaaagatgctttcgaaaaaatgaatgcgaaagctatgcaaaataatgaaaaggtatttgccaatcctaggaatgctgcctcaggatctcttcgacaacttgatcctaagattacttcaagcaggcccttatcttttattgctcatgggctaggtgagtgtgaaggaatccaattttcttcaatatctgaattttatgatcacttaaaagcatggaaaatacctacaagtgatttatccaagaaagttaagactaaagatgactgctta

SEQ ID NO: 319918 - DNA, 913 bp, Unknown
  Bacterial polypeptide expressing nucleotide sequence isolated from the Sargasso Sea
atgaataaaaaagaggatttaaaaaaaattaaaaagagattaaaagaattagctaaactaattaaattgcataacgtacattaccatcaaaatgataaacctatcatatcagatggagaatttgacaagctagtaaatgaaaattttgatttagaaaagaaatatcctaatttgattttaaaaaatagtcctaatgaaaacataggcagtaaattaaagcataaattcaaaaaaatagaacataaatcacctatgttgtctttagggaatgcttttaatttaaaagatgtggaagaatttgatgaaagaataaaaaaatatttaaatataaagaatgaagtaaagcttgagtatatttgtgaagctaaaattgatggcctatcactaaatttaatatacaaaaatggtgatttaatttcagctgcaactagaggggatggagtaaatggagaagatgttaaagaaaatatatctaatataaagaacataccaaaacgcttatctggtcaatttccaaattttatagaaataagaggtgaagtttttttattaagaaatgattttgagaaaattaattcaaaattagatgataaagataaattcgctaaccctcgtaatgcagctgcggggagtcttcgccaacttgattttaatgttagtagatcgaggcctttgcagtttttggctcacggtatgggatactcttctatacaatttgattattttgatgaattttatttaaatttaaaaaaatggggtataaaaaaaaataatatttatttaaaatcttctaatatcaattctatttttgatttttatagtgaaattaatgacaccagaaatagcctagaatacgacatagatggactagtaataaaattagataacattttacaccaaaaaagacttggaa

SEQ ID NO: 319919 - DNA, 1285 bp, Unknown
  Bacterial polypeptide expressing nucleotide sequence isolated from the Sargasso Sea
gatgacagaaaaaaataaaattttaaagctttatcaggaaaaagttaaaaaattcaataagtttaataaagcatattttgaaaaggataatccaattgtatctgatcgtgtattcgatgagttaaaaaaagaattaattaatcttgaaaaacaatactcttttcttaagagccccaaaggaattactaacaccgtgggattcaatccatcaggcaagtttgaaaaaataaaacactctaaacaaatgctatccttatcaaacgcttttgataaaaatgatatgttagattttgaaaaaaaaataaagaattttttaaatttaaataaagaaattgagctctcctcagaaccaaaaattgacggcatctcagcatcaataagatatgaagaaggaaaattagtatatggattatctagaggagatggtgtttttggagaaaatatcactgaaaatttaataactattaacgaaatccccaagaaaatatctaatgctccaaaattaattgaagttagaggtgaagtatatattggtaaaaaagattttgaaattttaaaagataaattcgcaaatcctagaaatgctgctggtggatcattgaggcagaaagattctaaagaaacaaaaaaaattccacttaaattttttgcatatggtatcggagaaatcaaacctcctatttttgaaaaacaaacagacttactggaaaaattaaaaaaatggggttttaaagtaaactcgtattgtaaaaaaattgctaatattgaagaaatagaaaaaaaccattctcaaatagaaagtctaagatcaagtttagactatgacgttgatgggattgtatacaaagtaaataacttggatttccaaaatcgacttggttcaacctctaattctcctagatgggctatagcttataaattttcctcagtaaaagcatcctccaagataagaagtattgctattcaagttggaagaacgggagctataacaccagtagcaaaaattgatccagtgacggtaggaggtgtagtggtttctaatgcaactttacacaatgaagatgagataatgagaaaagatattagaccaggtgattttgtaaccatccaaagagctggcgatgttattccacaagtattagaagtagataaatctaaaagagacaaaaatagtaaaaaatttattttcccagacaagtgtctttgcgggtttcctacaaagaaagatatgaatttaagcacaaaaaaaactgatgcagttagaagatgttcgagaggttatgaa

SEQ ID NO: 319920 - DNA, 772 bp, Unknown
  Bacterial polypeptide expressing nucleotide sequence isolated from the Sargasso Sea
ttgaatcaaataattgataaaataaaatcaattcgtgatcaattaaataatcacaactatcaatattatatacttgatgctcctataatttcagatagcgaatatgatattttatatagggagcttcaaaaactggaaacactccatcctgaattaattagtaatgattcacctacacaaagagttggagctaaaccattagaatcctttggtagtatagatcatagcgtcccaatgctttcattagataatgcaatgaacaaagatgaaactagtgctttttatgaaaggctacaaaaaggattaaaaacggatcaaactatagaaattattgccgaaccaaaactggatggccttggggttgagttagtatacaaaaatggaatgctttcacatgggtcaacaagaggtgatggctttacaggtgaagatattactcttaatttgaggactataccttctattccactatctttaagaacaaaaaatagagatataattgaattactagaagtccgtggtgaggttttcatcacaaaagcaggatttaatgaattaaataatgatcgattagataacgatcttcctacgtttgcaaatccgagaaatgcggcggcaggaagcttaaggcaactagacccaaaagtgactgctgaaagacatttgtcaatattttgttatgaagcaggacaattaaaaggggcatcatttaatactcataaagaatttctttctgcattgaaagattgggggttccccagtaaatcctgag

SEQ ID NO: 319921 - DNA, 1110 bp, Unknown
  Bacterial polypeptide expressing nucleotide sequence isolated from the Sargasso Sea
gatgaaaaaaaaagaaatagaaaaaaaatataaaagttatattgaaagttttaaaaaatataatctttattatttcagtaaaagtaaacccttagtttctgatggtgattacgataaattaaaacgtgacattttagatttagaaaaacaatacaaatatttaaaatcaaatgattcgccttcaatattaattggccacagaccttcaaaaaattttaaaaaatttccacatagagttcctatgctgtctttagggaatgcattttctgaagaagatttaataaattttgagaaaaaaattacaaattttctatcaagtaaagaggattttgaaatttcgtattgtgctgaacctaaaattgatggcatttcagcatcattaacttatataaatggaatttttgaaaagggtttatcaagaggtgatggtaaagaaggtgaggatataactagaaacttaaaaacaattcaagatataccaaaaaaaatattatccgaaagctttccaaaagaaattgatattagaggagaagtttttattcaaaatagcgattttgaaaacttgaaagagaagtttgctaatccacgaaatgcagcatcaggctcacttaggcaaaaaaatcctgaagatacaaaaaaaattccattaaaatttattgcttacacttttggttttgaaaaaggtttaaaggcaaagaatcaatttgattatctacaaaaattaagtacatggggctttaaaactaatcgattaaataaattgatcagtggtgttaaaaatttaattcaaaattataatgaaatcgagaaaaaaagagctaatttagattttgatatagatggtattgtatacaaagttaatgactttaatcttcaaaaaagattaggcaatgttgctaatgctcctagatgggcaattgctcacaaattttcttcaaataaagctacatcagaaatcaatgatattgagattcaagtaggaaggactggtgctttaactccagttgctaaaattaaaccaattaatattggtggtgtcttagtatcaaatgcaactatacacaatgaggatgaaattataaggaaagatattagaattgatgacaccag

SEQ ID NO: 319922 - DNA, 2032 bp, Unknown
  Bacterial polypeptide expressing nucleotide sequence isolated from the Sargasso Sea
gatgaaagcagattcagaagccaaatctcgagtactcgagcttcataagatcattaatgaacactcctataactatcataccgaggacaatcctatcattagtgattccgaatatgatgatctgttcaaagaacttatagagttagaggctaattatcccgatctgagttttagccattctccaacacaaagagtaggatcgaagcctttagacgggtttactaaagttgaccatttgacagccatgttgtctcttgaaaatgcttttaataataaagacttacaagacttcgataataggatcaaagaaaggcttatttcagaggaaaatattagtttttcgtgtgagcctaaattagatggaatagcagttaatctaatttataaagaaggatatttacatcaagcaacaactcgcggggatggaaaaacaggagaagatataacgcacaatataaggaccataccttccattcctttatctttaagagtgacagaaatagaacctcctaaattaattgaaataagaggcgaagtattcattgatatagaagattttaaaaaaattaatcgcaatgcaaaatctagctctgagaaagtttttgctaatcctagaaatgctgctgcaggaagtttaaggcaactagattctaaaataactgcatcaaggcctttaaagttttttgctcatggacttggagctttggattacggcaaaaatcactcaattcaaacccaaatggaagtttttgatttttaccgttcttggggactgcccattaacccattaaccgaattatctcatcatatcaatgaatgtatttcatatttcaccagaatagaaggcttgagaactcaactgccttatgagatagatggtgttgtttttaaagtaaatagttttaagacgcaagaatctctaggtcaggtttctagagctccaagatgggctattgcaagaaaatttcctgctgaagtaggatcaacaaaagtcaaatccattaccttccaagttggaagggtaggcagtattacaccagttgcagaatttgagcctctaaatctaggaggggtagtagtttctcatgccagcatccataactttgatgaaatagaacgcctcgatgtcagagaaggggattcagttcaaattaaaagagctggagatgttattcctcagattataaaagttgacttatcaaaaaggcacaaaagttcaaaaaaaataaaaccaccgagtcaatgcccatcctgtgataacaagttaattaaattagaagatgaagcaatattgagatgtaatgctgggaaaaattgccctgctcagaaaactgaatcaattagacattacgtttcaagaaatgctcttaatatagatggcttaggagagaagattatagagctcctagttcaaaaaagccttatttctgatttctcggatttatataatttaaataaagaagctttagtggaacttgaaggttttgcagaaaaatctgctacgaacctgctagagtcaatagaaaaaagcaaggaaactacgcttgctagatttatttatgctttaggaattagagaagttggggaagccaccgccttaaacctttctataaactttcaggatatagataaacttctgatggcttccaaggaagaattaatagaaataaatgatataggtccaattgttgctgatcatattttcgaatttttttctaatggagacaataaagaattaatagataaattgttgaagtcgggtgttatatttcaagaggtacaagctcagtcggataatttatttagttctaaagtcatcgtcataacagggtctttcaaaggtatagcaaggagccaactcaaagaagagttaataaggtcgggtgcaagagtttctggtagcgtctcaagcagaacagactaccttatagccggagaaaaaccgggttctaaacttaaaaaggcgattgatttgggaattgaagttttagaagaagataaagttttagaaattcttgcaaatcaaagatga

SEQ ID NO: 319923 - DNA, 1258 bp, Unknown
  Bacterial polypeptide expressing nucleotide sequence isolated from the Sargasso Sea
aaaaaaatcgataaatttaaggattacaataaagcatactatgatgatagtaatccaaaagtttctgatgaagaatacgatggtttaaaaaaaaaaattttaaaattagaaaatgagtataattttcttaaatctaaattttcgccatcaaatatagttggtttcaaaccctcaaaaaattttaaaaaatcattacacaaagtacctatgctctctcttggaaatgcattttcagaagaagatttagttaattttgaaaaaaaattaattaattttttatctctaaaaaaaaattatgaaatatattatagcgctgagcctaaaattgatggaatttctgcatcgttaacatataaaaagggaaaattttataaaggactttctagaggtgatgggaaggaaggggaggatattaccgaaaatctctcaactattagggatattcctaaaactattttttctaaagattttccagaggagatagatataagaggagaagtatatattcaaaatagtgattttaaaaatctaaatgaaaaatttgctaaccctagaaacgcagcctctggttccctaagacaaaaaaatcccgaagatacaaaaaaaattcccttaaaatttattgcatatacatatggatatcaaaaaggattattagttaataatcaatctgactttttaaaaaaattaaatgaatggggatttaaaacaaatccattaaataaagttatttctggaattaaaaatttgttaaaaaattataatgaagtagaaaaaaaaagggcaaatttagattttgatatagatggcatagtttataaggttaatgattttatgttgcaaaaaagactgggcaatgtagcaaacgctccacgttgggcaattgctcataaattttcctctaacaaagctatttctgaaatattagatattgaaattcaaattggtagaaccggtgctttaactcctgtagcaaaaataaagtcaataaatattggtggtgttatcgtttcaaatgccactttacataatgaagacgaaataaatagaaaggatttaagagttggtgacactgtagttgtagaaagagctggagatgtaattccacatattatttctgtagatttgcaaaaaagaccaaaaaatacttttaaatttgaatttccaaaaacatgtccttcctgtggatctaaaacaataaaagaatttaatactattaccaaaaaaattgatgctgttagaagatgttcaagtgagg

SEQ ID NO: 319924 - DNA, 1363 bp, Unknown
  Bacterial polypeptide expressing nucleotide sequence isolated from the Sargasso Sea
aatgaattcaaaattaaaaattatagaaatttataaaaaaaagattgatcttttaaaaaaacataacaggctgtatttcaattctgatgacccaataatttctgactctgaatatgatagtttgaaaaaagagattattaatttagagaaaaaaaatattttccttaaaaagctaaatttgaataagaaaatagtaggctctcctccatccaataagtttaataagataaaacatttaaaaccaatgctttctttatctaatgcttttgataaaaatgatatgaaggattttttaagtaaaattaataactttttaagtattaaagaaaaaagtatagaattttcttcagaaccaaaaatagatggtatttctgcaacatttatttatgaaaaaggagttttaacaaaaggtctatcaagaggagatggagttacaggtgaagatattttagaaaatcttaaaactattaaagaaataccgagaaagataaaagataataatgttccctccttacttgaaattcgaggagaaatatacatcggaaaaaaagatttcaataacatcaaaggtaattttgctaatccaagaaacgctgcgggtggatcacttagacaaaaaaatcctcaagaaacatctaaaataccactaaaatattttgcttatggatttggtgctattgagccaatgaagtttaaaactcaatcagaatttttagaaaaaataaaaagttgggggttctctattaatccaatagttaaaacagtaaaaagtttggaagatattgagtctcaacattcatacatagattccataagatcttcacttgactatgatattgatggattagtttacaaagtaaatgatcttaaattacaatcaaggttggggaacacttctaattctcctcgttgggctattgcatataagttttctgctgaaaaagcagttacaagaataaaagatatcatcatacaagttggtagaactggagcgataactccagtagctaaggtagaaccagtgactgttggaggagttgttgtttcaaatgcaacattacataatgaagatgaaatcataagaaaagatataaggataggtgatactgttcaaattcaaagagcaggagatgtaattcctcaggtaatttcagtagatttattaaaaagaaatcacaatagtaaaaaatatatttttcctgaaaaatgtttgtgtggtgcgattactcataaagaagtaaacaaatctactaaaaaagaagatgcagttagaagatgttctaaaggctatgaatgtgatttcactgcaagagaaaaattaaagcatgttgtatctaaagatgcttttaatattgatggttta

SEQ ID NO: 319925 - DNA, 2026 bp, Unknown
  Bacterial polypeptide expressing nucleotide sequence isolated from the Sargasso Sea
atgaaagatagtcttaagatcaaagaaagggtactggaactccataaacttataaacctccattctcataactatcattccttggatgaaccttctattgaagatcatcaatacgatgctttgtttaatgagctacttgatctggaagccaaatttccaaaatatcaattctcctattctccttcccaaagagtcggcggtaagcctcttgaaggtttcaagaaaatagaacacttgactcctatgctttctttagacaatgcatttaatgatgaagatatggaagactttaataagcgcatcctagaaaggctacttattcagggtaacataagcttttcatgcgaacctaaattagatggaattgcagttaatcttctatacaaaagcggtcacctagatgtagcaagtactagaggagatggaaagattggcgaagatatcactcataatataaggacgatcaattcaatacctctatcactaatagataatgattctgaactgccaagtcttatagagataaggggagaagtttttatcgaaaaaaaggattttgatttagcaaataaaaaagcaatcaaagaaggagaaaaaacttttgccaatccgagaaatgctgcagctggtagtcttcgacaactggacccttcaattgctgcttcaaggcctttgaaattttatgctcatggtattggctgcatagaggaaggaaaatttaaacttcctgactctcaatcagagatgttaaaacaatatcaatcatggggactcccaattaatcctttcagtgatgtggctgatgatttaaaagcttgtgaagaatattttcataaaatttcgaatgctagagaaaatcttccgtacgaaattgatggcatagtattcaaagtaaatgacctagataagcaaatttctttgggagaagtctccagggcgcccagatgggccattgccagaaaatttcctgctgaagtaggcactacggtagtcaaaaaaatctcttatcagattggaagagtcggtagcattactcctgtagccgaatttacaccagtcaatataggaggagttaccgtttcacatgccagcattcataattttgatgaaatagatcgattggatgtgagggaaggtgatacagtcgatattaaaagagctggagatgtcatacctcaaattatttctgttgatttggataaaagaaaaaaaggatctcaaaagatatccttaccaaaaagacttccatgctgtaagaaggacttagtcaaaatagaaggggaagctatccttagatgcaccatggggcttgattgtcctgcacaaagaattggatctttaatacattttgtttcaagaaatgctttaaacattgatggcttaggcgaaaggataattgaattattggtagataaaaatttggtatcaaatttcgctgacttatttagattagaaataaaggacattattgatcttgaaggatttggtgagaagtcagctacaaatttaattcgttctattcaagaaagcagagaaactactttaccaagatttatatattctcttggaataagggaggttggtgaagcaacagctatgaatttagctttaaattttaataacataactaatttcctctcagcaaatgaagaagatttattggagataaatgatataggaccggttgcatcaaattttataaaagaatttctagctatagaagaaaatataagtttagttgaagacttaatcactttaggagttaatcctaaaccggtggaaatcaaagaggataatccttttagctctaaatctattgtcattacaggttcgtttaatggcatagcaaggagtcaactgaaggaagaattgataagagtaggcgcaaaggtttctagttctgtttctagtaagactgaatttttgattgcgggagagaaacccggttcaaaactaaaaaaagcctctgatcttcaaatcccaattcttgatgaagaagaggccttaaagattctggacagttaga

SEQ ID NO: 319926 - DNA, 2020 bp, Unknown
  Bacterial polypeptide expressing nucleotide sequence isolated from the Sargasso Sea
atgagtagttcaaatataaaaaaaaaatattctttaaaaattagcgaaataaaaaaacataatcaattttattttgaaaaaaatactccaaaaatttctgataaagaatatgatgatctaaaaaaggaaattttagatcttgaaaaagagtacccatttttaattagcaaggattcaccttctaattcggtaggttttagaccttctaagaactttttaaagtctagacacagagtgccgatgctatctttagcaaatgcatttgataaggaaggtttagttaattttgaaaaaaaaatatttaattttttaaatttagataaaaatataaatttagaatatagcgtcgagcctaaaatagatggtatttcagcatcattaacatataaaaatggtaagttagttaaaggattatcaagaggaaatggttttgagggtgaattaattacagaaaatttaaaaacgatttctgatattccaaaaattttaaggagtaagagttgtccagatgatatagatattagaggagaagttttcatagaaaataaagattttaaaataatcaaagaaaaatttgccaatcccagaaatgctgcctcaggatcacttagacaaaaagatcctcagcaaacaaaaaaaatacctcttaaatttatagcctatacttttggttttataaaaaattttaagcttaataaacaatcagattttttagaatttttaaagcaatggggttttaaaacaagtcaatttaataaagttataagtggaatagataatttacaaaaaaatcattcagaatttgaagaaaaaagacatgatcttgattacgatgtcgatggactagtttataaaattaataattttaaattacaggaaagattaggatttgttgcaaatgccccaagatgggcaattgcccataagttttcttctgacagttcattttctgaaattatggatatagatgtgcaagtgggcaggacaggtgctttaactccagttgcgaaaattaaacctgttaatattggaggagtagttgtttccaatgcgacattgcacaatgaggatgaaataattagaaaagatatacgaataggtgatacagtaaaagtggaaagagcaggagatgtaataccacatgtgctatctgttgatctcactaaaagatccgataattcaaaaaaatatagtttccctgaaaagtgtccgtcatgtggttccaaagtagttaaagaatttaatttaacaactaaaaaatatgatgctgtaaaaagatgcccaagcgaaggttttaaatgtgaaaaaatagcaattgaaaaaattaaacactttgtatcaaaagaagctttaaatattgagggacttggtaaaaaagtggttgaaaatttttgggaaataaaattgataaaacttcctcaagatatatttaatttagattataaaaaaatagaatccctagatggatggggcaaactttcagtttcaaatttaaaatacgcaattgaagagtcaaaaaaaataactttagaaaaattcatattttctttagggataagacatatcggacaggaaaatgcaaaactattgtctaaacattttaaaacagtaaagaaatttattgatatagatacaaaatttaatttcaatacactgcttaatattgatggcatgggagaaacccaagttaactcattaaaaagatttttttcagataaaaaaaatattttagtagtaaataagttgtatcaaaatctaaatgtatcaaatcaagaaattttacagactggtaaatttcaaaataaaactttcatgataacaggaaagcttgatggtataagtagagcagaagcaaaatctttaattgaaaaaaatgcaggtagatttgtaagcaatgtaagcaaaaaattgaattatttaattattggtgaaaatcccacatcaaagaaagttaatagagcaaaagagttaaatataaaaattattgatcaaaaaaaatggcaagaactgttaaattaga

SEQ ID NO: 319927 - DNA, 1417 bp, Unknown
  Bacterial polypeptide expressing nucleotide sequence isolated from the Sargasso Sea
atgaatcctagaaatacagcttcagggagcattaaacttcttgattctaaagaagtggctagaagaccattagagtgctttttatactctattgtttcagataatttaaatacaaataaacattctgaattattaactctcggaagagaactgggatttaatatccccaaacatgatagggtatataacactatagatggtgtaaaggattatatagaatactgggataaagaaagagaaaatctaccttttgaaatagatggtattgttattaaagtaaacaacatatcttatcaaaaaaaattaggatttacctctaaatttccaagatgggcaatcgcatataaatttaaagcagaaaaccttcaaactagattaaattcaatttcatttaatgtaggaaggacaggtgctataactccagttgcgaatttagaacctgttttaatttctggatcaatagtaaagagggcttcacttcatagttatgatcagtttataaagtataaactaagagttaacgattctatttttgttgagaaaggtggtgagattattccaaaaataacgggtattgatgataaaaatagaggtttagaggaggatgaaatagcttttccacatatatgccctgaatgtaatacaactctagaaaaacataaatctgaggcaaactatttttgtccaaacagtcttaattgcagacctcaagcaataggaagaatccagcactttgtttcgagaaaggctatggatattgatggacttggtgatgagactataaggttattatatgataaaggtcttcttaatgatgtatcagatatatataatttagattatgataagatttctgaatttgatggatttgctaagaagtcagtagagaatttaagtatgggaattgagaattctaaaactaaatcatttcaaaaagttctctatggaataggcatcagatatgttggagagtctgcttcaaaaaaaattacaaaacatattgattctatatatgacttaattagaatggactatgaaaccttatcctcaatagatgagataggtgataaaacagcatatagcattgtctcatattttaataatgatgcaaataataaaatgcttgaaaggcttgaaaatgcaggccttatctttagtaaggatgaagagtcaaaaaacatatcaaataaactgaaagggaagaaaatagttatttcaggagttttcaggaattattcaaggggagagttgataaatatagttgaaataaatggcggagaaataaagtcttcagtctcatcagctatttccttcataattggaggagataaaataggagtctcaaagaaagaaaaagctgaaaagttaaatatccagattataacagaggaggattttactaatttaatttcataaa

SEQ ID NO: 319928 - DNA, 1369 bp, Unknown
  Bacterial polypeptide expressing nucleotide sequence isolated from the Sargasso Sea
aatgagtaagccaagcaagaaatacatttctatccaaaagacaattcgctcttatgattatgagtattatattcttgatgacccatcaatatctgatcatgagtacgatgaattatttagagagttaaagcaaattgaatctgagcatccagattggattactcctgaatccccatctcagagagttggtatcaaacccgaaaatgattttgatacttttaaacattttcagcccatgctttcacttgctaatgcatttaatgaagatgatttaaataattttcatgatcgaattcttaaaaatttaggtacagataagcaaatagattacttttgtgagcctaagatggatggcgcagctgtttctttaatttatgaagaaggcattcttgtaagaggagtaacgagaggagatggaaatcttggagaggatattacttctaacattagaaccatcagatctattccattaattttaaaagagtctaaaagtccttttccaactatgattgaggtaagaggcgaggtattcattagcaaaccagactttgagacattgaatgtaagtgcagaaaaaaatggcgagaaaatatttgcaaaccccagaaatgctgcagctggaagtttaaggcaattagatccggctattacaagttcaagaccgttagctttttttgctcatggaataggattatgtcagggtaagaaatttattgatttacaagaaatattttcagtctttgcttcttgggggttacctgtcaataatttaaataaattgtcatcctctatcgatgagtgcctaaactattttaaagacgtagaatcctctagagattctattccgtttgagatagatggggtagtatttaaggttaatgagatctcattgcaaaaacaacttggagaaattgcaagatcaccaagatgggcgattgcacataaatttccagctgaggaagtgcatacagaaatagaaaaaatagagtttcaagttggaagaactggaattttaactcctgtagcaaaacttaagacagttaacgttggcggagtaaatgtaagtaattgcacccttcataatcttgatgagttaagaaggctagatcctagagtcggagacggagctataatcaagagggcaggtgatgtaattcccaaaatggttatggttattccaaaaaagaacaatagagcagatgcagttgagacgccaaaaaaatgtccaagttgccagtcagcaatagctcacaattatcagtctgaatggacaatttttgataaaagcaaatcaatgcccataaaaaaattttcaagcagttatgaggctcaaaaatttgtagaaagtaatcattcgaaaaaattttag

SEQ ID NO: 319929 - DNA, 1999 bp, Unknown
  Bacterial polypeptide expressing nucleotide sequence isolated from the Sargasso Sea
aatggatatagagactaaaattcaggatctcagaaaaaaattaaatgatcataattaccattattatgtcctaaatgatccaattatttcagattcagaatatgatgagctactaaggttgcttcaagatattgaacaaaaaaatccaaaccttgtaactgatgattctcctacccagcgggtaggcgctcctccgcttgattcttttgaatctgttgaacatagagtcccaatgctttcgcttgaaaatgcaatggattctgatgaattaattagttattacaatagaacaaaaaaaggattggacatagatgcagatatcgattttatagctgaacctaaactagacggcattggggtggagcttatttatgaagaaggtcatttaaaatatggacttacccggggtgatggcctaaagggtgaaaatattactcaaaacttaaagacaatcaatgctataccgctttctttgagaaccaacttgagacctgccccatatttacttgaggtgaggggtgaagtatttatggataaagataggtttagagaattaaataattatcgcagtaaaaatgatttatcaatatttgcaaatcctagaaatgcggcggctggcagcctgcgacagctcgattcttcaattactgccagtcgacctttatcaatttattgttatgagcctggtgaaataattggggaaagctttcagacgcataaatcatttttagatgctttaactgaatggggattcccagtaaataatgaaatatccgttacaaatagtattgatgaaatagttaattatcatcaaacacttgaagcaaaaagaaacaatttgccgtatgaaatagatggaactgtatttaaggtaaataaaattgagtatcgtaatagtttggggttaagaagtagatcacccaggtgggcgattgcaggaaaatttaaagctgaacaagtcaccagtgtagttttagatattatagcatcaataggaagaactggtgcggtaacccctgtggcaagattagatcctgtaaatgttgggggtgtaattgtcacaaatgccacgctacataatcaagatgaaattgataaaaaagacgtaagaattggagatacggtattggtacaacgcgcgggtgatgttattccagaagtcgttaagattatagaaaccaaaaggccagagaaaactgaaaaatacaaactaccccgttcttgtccggaatgcgataaagaaatagttaggccaaaaggagaatctgtagcccgatgccataatttatcatgcccagcacaaataaaaggtcgtatccaacatttcatttcaaaaggcggtttagatattgatggatttggtgagaaattagtgaaccaactagttgataaaaaccttgttcgaacttttgatgatatttataaacttaattttgatgaccttgtcgatctcgatcgtatggcagaaaaatctgctgaaaatattattgcttcaattgagcattcaaaaaaaactacattttctagatttgtttatgcgcttggaataagaaatgttggtgcgcatttatctaaagtacttgaatcaaaattttcatcagatctatcaaaattcaaacaggcgacaattgaagatttggagcaaattaatgaagtaggtccaattgtagcggaggctattgtacaattttggtctgatgaatctaacataaagattgttgaaaaatgtctgtctcatggtattgaattttcacaaagatccaaacaaataagccagaagtttgaagggctaagtttcgtttttactggaactttaaagacactgactagaggcaatgcaaaaaaaattgttgaatcaaatggcggcagggtaaatagctcggtaagtaaaaatactgactatgttgtggctggagagtctgctgggtcaaaattagaaaaggctaaaagcgttggcgttaaaataatttctgaaaatgaatttttaaagatagcataa

SEQ ID NO: 319930 - DNA, 1465 bp, Unknown
  Bacterial polypeptide expressing nucleotide sequence isolated from the Sargasso Sea
ctgattgccagccttattgagataagaggagaagtttttatcgaaaaaaaggattttgatttagcaaataaaaaagcaatcaaagaaggagaaaaaacttttgccaatccaagaaatgccgcagctggtagtcttcgacaactggatccttctattgctgcttcaaggcctttgaaattttacgctcatggtatcggttatattgaggaagggaactttaaacttccagactctcaatcagagatgttaaaacaatatcaatcatggggacttccaattaatcctttcagtcatgtggcttctgatttaaaagcatgtgaagaatattttcttaaaatttccaatgcgagagataatcttccgtacgaaattgatggcatagtgttcaaagtaaatgacctagataaacaaatttctttgggacaagtctccagagcccccagatgggccattgcaagaaaatttcctgctgaagtaggcactacagtagtaaaaaaaatctcttatcaggttggaagagtcggtagcattactcctgtagccgaatttactccagtcaatattggaggagttaccgtttcacatgccagcattcataattttgatgagatagatcgattggatgtgagggaaggcgatacagtcgatattaaaagagctggagacgttatacctcaaattatttctgttgatttggctaaaagaaaaaaaggatctctaaagatatccttaccaaaaagacttccatgctgtaaaaaggatttagttaaaatagaaggggaagctatccttagatgcaccatgggacttgattgtcctgcacaaagaattggatctttaatacattttgtgtcaagaaatgctttaaatattgatggcttaggcgagaggataattgaattattggtagataaaaatttggtatcaaatttcgctgacttatttagattagaaataaaggatattattgatcttgaagggtttggagagaagtcagctactaatttaattcattctattcaagaaagtagagaaactactttacctagatttatatattctcttggaataagggaggttggcgaagcaacagctatgaacctagctttaaattttaataacataactaattttctctcagcaaatgaagaagatttattagagataaatgatataggaccggttgcatcaaatttcataaaagaatttctagctatagaagaaaatataagtttagttaaagatttgattaccttaggagttaatcctaaagcagttgaaattaaagggggtaatccttttagctctaaatctattgttattactggttcgtttaatagcatagcaaggagtcaactgaaggaagaattgataagagtaggggcgaaggtttctagctctgtctcaagtaagactgaatttttgattgcgggagaaaaacccggttcaaaactaaaaaaagcct

SEQ ID NO: 319931 - DNA, 2008 bp, Unknown
  Bacterial polypeptide expressing nucleotide sequence isolated from the Sargasso Sea
tatgaaagatattgaatcaaaaatgaaacgactgattgatgaaataaattttcataattaccaataccatggaatggatgatccaaaaatatcagactatcagtttgataaattagtcatagaacttttggatttagagaaagagaatcctcaacttatacaagtagactcaccaacccaaagggttggctcaagacccatagatggttttactcaaattgatcatctaaccccgatgctctcactagacaatgttttcaccatggaagaattaatgtctttcgaaaagagaatcaaagataaattatcgttagaagataaaattgagtttattgctgaaccaaaactagatggtgttgcagtcaatttagtatatgaatcaggaatattatcttatgcaacaactagaggagatggaacaacaggagaagatgttactcacaatgttcttacaataaaatcaattccaatgaagctgaaatcatcgacaccacccaaaacaatagaaatacgtggtgaaataattatttcaaagaatgatttcgagacaatgaatagagaaaatgcagataaagagttgaaggtatttgcaaatcccagaaatgctgcggctggaagcattcggcaactagatccaaacatttcaaaagatagaccattgagattttatgctcatggatacggcttactatccaatgaggataaattctcttcacattatgaagtgatgaattacctaaatgactcaggaattatcatctctccttactcagaaattgtaactggcgctgaggaatgcgggagatattatgaaaaaattgattctcttagagagtctcttgattttgaaatagacggcgtagtttataaggttaataacatttcacagcaaaaagaacttggcttcgtttcgaaagcgcctagatgggcaattgcccataaattttcttctattgaggttgaatcgaaaattatagacgtagatttccaagttgggagaacgggcacaattaccccagttgcaaaattaaaacctatcaatgtaggtggtgtcgttgttagcaatgcaacgctgcataatatggatgaaattaatcggaaagatgttcgcaaaggggactatgtgtttgtaagaagagcaggcgatgttattcctgaaatcgtttcagtaaataaaaaaaagagaagtaacataacaaagaggattattttccccgatcaatgcccttcatgcggttcagaaatcgttagaaaacaaggagagagcgccgcaaaatgcactggtggaagcatttgccctgaccaaactaaagagcttctaaaacattttgtttcaagaaaagcatttgatattgaagggctgggtgaaaaaatcttagatcaactattggaatcaaatatgatttcaaatacatctgatcttttcagtttgaaaatagatgatttaatatcattagatagaatgggaaaaaagtcatctcagaatttaatctcctcaatcgaagcatcaaaaaatattagttttgatcgatttatatatgcgcaaggaattcatgacgttggtcttgctacgtcaaaatctctttcagagtgtttttcatcattggagaaacttattaatgcagaaatggatgacttactgattattcgtgacattgggccggttgcagcaaataacattataagtttctttaacgacagaaaaaaaataaaaaatatagatcgcctgattcatctgggtgtagtgattgtatacgaatcagaaatggacagtcatattctcaatgataaaaccttcgtgataacgggaactatacaaaacatgacacgcacagatgttcaagatcttatcgagaaaaatggagggagagttacatcctccatatcaaaaaaaacaagttatttagtagctggcgataatccaggatcaaaaataaaaaaagcagcggatatcggtgttactatcataaatgaagaacagttgtcagaattaattaaaaatggataa

SEQ ID NO: 319932 - DNA, 1381 bp, Unknown
  Bacterial polypeptide expressing nucleotide sequence isolated from the Sargasso Sea
aatgaaaaataggaatttaattaaaaaagattatctcaatagaataaaggaattaaatgaacataatcagcactattatgaaaaaagctctccaaaaatatctgatgcagaatatgataaattaaaattaaagattactgaacttgagaaaaaatatagttttttaaaaaataaaaactctccaacattattagttggagccaagccatcaaaaaattttcttaaatccaaacatagagtaagaatgctttcgttagcaaatgcctttggttatgaagatttaaaaaattttgaaaaaaaaatatctaattttctaaatttaaaaaaagatacaaatattgaatatagtgttgaaccaaaaatagatggaatttctgcatcattaacatataaaaataacaatttagttttgggtttatcaagaggagatggtgctgaaggtgaaataattaccgataatttaaaaacaataagaggaattccaaaatcaattaaagataaaaaatttcccaaagatatagatataagaggagaggtatacattgggaaaagtgattttgaaaaaataaaggatagatttgcaaatcccagaaatgctgcatctggctcacttaggcaaaaagatccaagtgaaacaaaaaaaattccacttagatttattgcttatacgtatggatttaatagtgaaatgaattttaaaaaacaatctgaatttttaaatcttcttaagaattggggttttaatacaaatattcataacaagattataagtggtgtaaataacttggttcaaaaccatagggaatttgaaaagaaaagatatgatttggattttgatgtagatggaatggtttataaaataaatgatttagatcttcaaaaaagattaggttttgttgctaatgctcctaggtgggcaattgctcataaattttcagctgataattcattttcaaaaatattaaatattgaaattcaaataggaagaactggtgcactaactccagttgcaaaaataaaacctgtgaatataggaggtgttgtagtttcaaatgcaacccttcataatgaagaggaaataattagaaaagatataaggataggggatacagttaaagttgaaagagcgggggatgtaatcccacatgtactttcagtagatttaaaaaaaagaccaaaagaatcaaaaaaatttttatttccaaaaaattgtccagcctgtggctctaaagtaataaaagattttaataaaatttcaaaaaaatatgatgcagttcaaagatgttcaagcgaaggatataaatgtgaaaaaattgcaattgaaaaaattaaacattttgtttcaaaagaagcatttaatatagaaggattaggcaaaaaa

SEQ ID NO: 319933 - DNA, 1534 bp, Unknown
  Bacterial polypeptide expressing nucleotide sequence isolated from the Sargasso Sea
atgaataaaaaagaaattctttttaattataaaaaaaaaatagataaatttaaggaatataataaagcatactacgaaagtagtgatccaaaagtttctgatgaggaatatgattatctaaaaaataatattttaaaattagaaaacgagtataattttcttaaatcaaaattttcaccatcaaatatagttggattcaaaccttcaaaaaatttcaaaaaatcattacacaaagtaccaatgctttcccttggaaatgcattttctgaggaagatctagtaaattttgaaaaaaaattaattaattttttatctcttaaaaaaaattatgaaatattttatagtgctgagcctaaaattgatggaatttctgcctcactaacattcaaaaaaggaaaattttataaaggactttctagaggtgatggcaaagaaggtgaggatattactgaaaatctttcaacaattaaagatattccaaaaactattttatctaaagattttccagaggagattgatattagaggagaagtttatatacaaaatagtgattttaaaattttaaatgacaaatttgctaatcctagaaatgcagcttcaggttctttaagacaaaaaaatcctgaggatacaaaaaaaattcctttaaaatttattgcttatactttcgggtatgaaaaaggattattagttaataatcaatttaactatttagaaaaattaaatgaatggggatttaaaacaaatccattaaataaacttatttctggagttaaaaatttaataaaaaattatatagaagtagaaaaaaaaagaaccaatttagattttgatatagatggcatagtttataaggttaatgaatttgcattgcaaaaaagactcggaaatgttgcaaatgctccacgttgggcaatagctcataaattttcctcaaacaaagcaatttctgaaatattagatattgaaattcaaataggtagaactggagccttgactcctgtagcaaaaataaaaccaataaatattggtggtgttgtggtttcaaatgcaactttacacaatgaagacgaaataaatagaaaggatataagagttggagataccgttgttgtagaaagggctggagatgtaataccacatattatttctgtagatttaaaaaaaagatcaaaaaacagtttaaaattcaaatttcccacaaaatgtccttcatgtggatctaaaacaattaaagaatttaacactattacaaaaaaaattgatgcagttagaagatgttctagtgagggttatgattgtggtaaaatttcagtagaaaaattaaaacattttgtatcaaaagatgcatttaacatagatggatttggaaaaaagattgttgaaggtttttggaaaattaaattaataaaatatccacaggatatttttaaacttgattataataaaattgaaaatcttgacggatgggggaaactatcagttaaaaatttaaaatattcaataaatgaaaagaaaaatatttcatggaaag

SEQ ID NO: 319934 - DNA, 1168 bp, Unknown
  Bacterial polypeptide expressing nucleotide sequence isolated from the Sargasso Sea
atgaaaaaggaaattcaaaagcatattcatgaacttagagatgaaattcatcaccataattttttgtattacacaaaagataagcccataatttcagattatgaatttgaccaaaagttaaataaattgatttctttagaagaatcttatcctgaatatgatgatattaattctcctacaaaaagaataggagggggactactaaacaattttgaaacaaaaaaacataactatccaatgtattctttggacaatacatataccaaagatgaggtaaatgattgggtaaaaaaaattaaaaaaataattggagatgatgatgagttaagcttcacatgtgaactaaagtatgatggtgtttctgttagtttattgtatgaagaaggtttgttaattcaagctttaacaagaggagatggagtaagtggggatgacataacagaaaatgtgagaactattccaacggtgccattagtacttaataagttttcacctaaaaatattgaaattaggggagagatattaatgacaaaaaaatcatttgaagaattgaatttaaaaagagttaaagatggattacctaaatacatgaatccaaggaatactgcttctggaacactaaagctaaaggatagtaaattagttgcaaaaagaaaattagtttgttatttgtttagtgtaataaataaaaatgaaaatcatctaacacaatttgattcgctctctaattcaagatcctatggatttaaagtgcctaatgaattaattttagctaaggatattaattcggtttttagctttatagacaaatggaactatgatcgaaaaaaattagattatgaaatcgatggaatagtaattaaagtaaacaactttcaattacaaaaaaaattaggattcacttccaagtatccaagatgggcaattgcatataagtttaaacctgaaaacatctatactagattaaactcagtaacctatcaggttggaagaacaggagctataacccctgttgcagaactttctcctgtgttgatttctggcacaaccataaaaagagcttcattgcacaactccgatcaaattgataagttagaattaagaattggagattatgttaaagttgaaaaaggtggggaaataattccaaaaataattgggggttgac

SEQ ID NO: 319935 - DNA, 2002 bp, Unknown
  Bacterial polypeptide expressing nucleotide sequence isolated from the Sargasso Sea
aatgaatatttctgaaaaaattaaatctattagagaaaaaataaatgaacataattatcaatattatgttttagataatccaataatatctgatggtgaatatgataagttatttttagagctcgaatcgttagaaaaacaaaatcctgaatttgtaattccagagtctcccacacaaagaattggtgcaaagccaattgaaagctttgggactgttacacatcgtattactatgatgtcactagcaaatgctatggatacaaatgaattaaaagcatttgataagcgactcaaaaaaagattaaaaactgatgatgagctagaatatgtaattgagcctaagctggatgggctcgctgttgaattaatttatgagaatggaatatttgttaatggttctacgcgaggagatggaaatacaggtgaagatatcacatctaacctaaagacaattaaggctatacctttaaaattaagggatgatagcacttcttcccccagattgcttgaagtaagaggcgaggtgtttattagaaaaaatgattttcaagacttaaacactaaacgattacaatctaatgaacagccttttgctaatccacgaaacgctgctgccggaagcttaagacaacttgatccaaaagttactgcaaaccgcgctttatcaatttattgctatcagtcaggtttagtagatggaattgattttaaaacccatttagaatttttagagtttttaaaaagttgtggtattcctgtaaatcctgaagtaaaaattgttaaagggattgataaagcgattgattttcataaaaaattagaaatcaaaagaaatcaattcccatatgaaattgatggttcagttataaaagttaattctttatctattcgtaacgagcttggagtaagaagtagaagtccacgttgggctattgctggaaaatttaaagcacagcaggttactacaattattaatgatatttttgcctccgttggcaggacgggcgcagtaacgccggtggcaaggctcgaaccggtagaggttggtggagttacagtaacaaatgcaactctacataatcaagatgaaataaatcgaaaagatattcgaattggagacacggtaataattgagcgctctggtgatgtaattccaaaagtagtaaaagtaattcaagaaaaacgcacagataatactaaagcctactatttaccagcttattgccctgaatgtgatagcgaattaaatagaccagagaatgaagtggtttaccggtgtctgaattattcttgtccagcaaaaattaaagggaacataaaacattttgtttccaaaaacgcattagatatagatggtcttggggaaaaattaattgatcaattagtaaatgaacaaattattaaaacagtagatgatttatttcgaataaataaagatcaattagcaaatcttgaacgaatgggcaataaatctgctgataatattattgaatcgattagcaaatgtaaacaaactacattttcacggtttatatatggacttggaataagacatgttggtgaacatacatcaaaactattagaaaaagcttttaacagtgatttggaagtattcatcaaatgttcatttgaagatttagagtctattgaagaggttggcccaattgtcgcagattcaattattggattttggaatgatgaatcaaataaaaagattgcaaatgaatgtttttctttaggtgtaaagtttaagaaaaattatgaaacagctatacaaactctgcttggaaaaacatttgtttttaccggatcattaaaaatatttacaagagcagaggcaaaacaaatagtagaaaaacttggggctcgagcgagtaactcaataagtaaaaatacagattatctggttgctgggccagggtctggttcaaaacttggcaaagctaaacaattaggtataaaaattattaatgagggcgaattcgaaaaattgatagcctag

SEQ ID NO: 319936 - DNA, 1491 bp, Unknown
  Bacterial polypeptide expressing nucleotide sequence isolated from the Sargasso Sea
aatgaaagaatctctaaaaatcaaagaaagagttattgaacttcataagctcataaattttcattcctacaattatcattctcttgattctccttcaatcgaagaccatgaatatgatgctttatttaatgagttactaaatttagaagcagaatatcccagctataaattttcttattctccctctcaaagagtgggaagcgagcctttagagggtttcgtgaaggtagagcatctagcgcctatgctttcattagataacgctttcaattctgatgatatgcatgattttaacaaacgtattcttgatagactcacgggaaaagaagctatttcatattcttgtgaacccaagcttgatggaatcgctgttaaccttttatataagaatggttgcatagaaaaagctactactcgtggggatggtaaggttggagaggatattacacataacgtcaaaactataaattctattcctctttctttaatgaatgatgaatcagaattgcctaatctaattgaaattcgtggtgaagttttcatcgaaaaagatgactttgattctaataataaaaaggctgcaaagttaggtcaaaaaacttttgctaatcctaggaatgcagctgcaggtagcttaaggcagctagatcctacagttgcagcatcaagacctttaaagttctttgctcatggaattggttttatagacaaaggtaattttgaactgccagaatcacaatcagatactttaaagttatataaagcatggggtcttccaacaaacccattgagcgatgtggtatccaacatagaagaatgtgaagcttattttgaaaaagtctctaatcaacgacaaaagttgccatatgaaatcgatggagttgtatttaaagtcaatgacttgaaagatcaaattacattaggccaagtttcaagggctcctagatgggcaatagcaagaaagttccctgcagaggtcggtacaacttttgttaaaaagatttcctttcaggtaggaagagttggaagtattactccagttgctgagtttgaaccagtaaacattggcggagtgatagtatctcatgcaagtattcataactttgatgaaattgaacgtcttgatgtaagggaaggagatactgtaagagttaaaagagcaggggatgtaatacctcaaattatttctgtagatattgggaaacgcaagaaaacctccactgaggtgcaacctcctgatagttgtccatcctgtgatgggaaactaattaagcctgatggagaggcaatacttagatgcactgcgggtttaatttgtccagcacaaaaatgtgaatccttaattcatttcgtatctagaaatgcactcaacatagatggacttggagagagaattattgatctgttagtagagcgaggtttagtctccaattttgcagatttattcaagcttgagaaggacgatatactaaaattagatggttttagaga

SEQ ID NO: 319937 - DNA, 968 bp, Unknown
  Bacterial polypeptide expressing nucleotide sequence isolated from the Sargasso Sea
aatgttaaaaagttcagcgaaaaaagaatacgaaaaaaaaataaaacagtataaaaaatatagcaaaaagtactacgaagatagtgctccaataatatcagatcgtgattttgacttactgaaaaaagaaattttagatcttgaaaaaaaatttgattttaacgataaagaatctccttccaaaacattaggttttacgccctcaaaaaattttgaaaaatttccccatagagtgagaatgctttctctagctaacgcatttgatgaggaggatttgataaattttgaaaaaaaaattgtaaattttttgaatttaaaaaaaaattttgaatttgaatatagtgccgaaccaaaaattgatggcatatcggcctctcttacatataagtctggtaaattaataagaggcttatcaagaggaaacggagaagaaggagaagatataaccttaaatttgaagacaatatctgacattccacattttatagaccaaaaagattttccaaatgacatcgatattaggggggaagttttcattcagaataatgattttgagaaaatgaaagataattttgcaaatccacggaatgcagcctcaggttctttaagacaaaaagaccctacaaaaacatctaagatacccttaaaatttgtcgcttacacgtttggattctcatcagatcaaataatagacacccaaactaattttttaagtaaattaaaaaaatggggtttcaaaacctcagaattaaacaaaaaaattacaggaataaaaaatcttttgtctaatcatcaaaatatagaaaaaaaaagatttgaattaaattatgatattgacggtatcgtttataaaattaacgattttaagctacaaaaaagattaggatttgtaacaaatgcaccaaggtgggcaatagctcataaattttctgcgagcaattcagttactgaaattttgaatattgata

SEQ ID NO: 319938 - DNA, 1028 bp, Unknown
  Bacterial polypeptide expressing nucleotide sequence isolated from the Sargasso Sea
aatgaataaaaaagaggatatcaaacaaataaaaaatagaataaaattattagccaaattaattaatgaacataatgttcattatcaccaaaatgacaaacctataatatcagatggtgaattcgataaattaggtattgaaaattcacttttagaaaaaaaatatcctaatttaaaattaaaaagtggaccaaatgaaaatgtaggtggaaaattaaaaaataaattcaagaaaattacacataaatcgcctatgctttctctagctaatgcttttaatgaggaagatattgaagaatttgatgaaagagtaaaaaaatacttgaatatagatatagaaaaaaaactagattatatttgtgaagctaaaatcgatggcctttcacttaatttaacatacaaagatggtatattgatatccgcagcaacaagaggagacgggcttataggggaagatgtaactaaaaatattataaatataaaaaatatacctaaaaaattaaaaggcagttttcctaatttcatagaagtcagaggagaggtttttctaacaaaaaaagattttgaaaatattaattcaaaattagataataaaaataaatttgctaatccgcgaaatgcggctgcgggaagtttgcgacagcttgacgttaacataagtaaatcaagaccattacagtttttagctcatggtataggacattcatcgtatgaatttagttattttgatgagtattatgaaaatttagaaaagtggggaattaaaaaaaatcaaataaatcttaaaatatcaaataagaaatcgatttttgatttctataatagtataaatgaaaaaagaagtaatttagattacgatatcgatggtttggttataaaattaaacaatatatcaaatcaaaaaagacttggtaacgttggtaaaaatccaagatgggcaattgccttaaaattttctgcagaaaaagctaaaaccataataaaggatgttgattttccagttggtagaacaggatcaataactcctg

SEQ ID NO: 319939 - DNA, 1918 bp, Unknown
  Bacterial polypeptide expressing nucleotide sequence isolated from the Sargasso Sea
tctcagaaatatcttaaataatcacaatcatctctattatgtgatggactcccctgaaatatctgatcatgaatacgatcaactatttaaagaactgagctctttggaagataaatttcctgagatgaaagatacatcatcccccactcaaaatgtgggctctatagccggctcagcttttaatactgtaactcatgaagtaccaatgttatctcttgagaatgcatttgataaagaagagctagaaagattcgataagcgaattcatgaaaaattaaaattaccaatgaatgaacctgttacatattcatgcgagcttaagtttgatggtgcagctgtgagcgttatatataaaaacggtaatctcatgagagcggctactcgaggtgatggaaaaaaaggggaagatatcacccataatatcagaacgattgaatctttacctatgacattgactggagacgattttccagagtatctggaaataagaggcgaggttttcatgacaatttcagggtttagtgagcataataagattgcaaaaaaaaataatgaaaaagtattcattaatccacgcaatgcggcatctggaagtctaagacagcttgatccaaatattacaaaaaaaagacccttagatatatatttctttggaataggacaaattagcaaagattttataccaaaaaatcatcatgaagctatagataaccttaaaaagtggggtatcaatatttgtcctcataggcaccttgcagtaggcatcgaagaatgcctgactttttatgaggagatttataagaaaaggggttcattagattatgacattgacggcctggtgtataaagttgatagcatcgatctgcaaaaacatctcggttttgtatcaagagctccaaggtgggctattgctcataaattcccagctcaagaaaaatactcaattgttgaagatgttcattttcaggttggaaggacaggcgctgtaacacctgtagcgaaaataaagccagtatttataggtggagcaacgattcaaaatgtcacactccataatatggatgaattaaaaagaaaggacataagaataggagatacagtaagtgtcagaagagcaggcgatgttattcctgaaatagtgagcgtgattacttcaaagagaaaaaactcagagatgattaggatgccacatagatgtccaatttgtggctcgattattcaaaaagtcgaaagcgaagcaatatacagatgcactggtggttatagctgccgctcacaaaaaatagagtatttgaagcattttgtctctagacaggctatggatatcgatggtatgggttcaaaactcatcgagcaacttgttgataaaaatttaatatctaccccagatcaaatatttaaactttctcactcacaactttgcgaattggatagaatggcttctaaatctgctaaaaacataattacatcaatatcaataagcaaaaaaacaacactctctaaatttttatacagtatgggtattagagaagttggcttaaccatggcagatacacttgagcagcattttaagagcttggaaggtataaaaaatgcatctattgatgaacttctggaggcccctgaaattggaccaattgttgccaataatataaagaactttttcgcaaatgattcaaatcaagaaataataaataatctaatcaattctggtgtaacttggcatattgaatcattgaataaaaatgatgaaaaacttttgttaaaaggaaaagtaatcgtcctgacgggaaccctagaaaaaatgtcgcgtctagaggctatggactttataaaatatagaggaggtaaggtatcttcttctatatcaaaaaagactgattttcttgttattggaaataatcctgggttcaagtaa

SEQ ID NO: 319940 - DNA, 2086 bp, Unknown
  Bacterial polypeptide expressing nucleotide sequence isolated from the Sargasso Sea
tatggctaaagacgagctaactcgtcttgctgatttattaaatagagcaaataacgcctaccaccgtgatgacagtcctattatgacggatgcagaatttgattttctaaagaaaagaaatttagaaattgaacttaagtttccccaatataagaaatcagatagcccaacagaaaaaattggatctctaccttcagaaaaattttcaaagatcaagcatgcaaaaaaaatgttttcattagcgaacgcttttgagaatagtgatctttatgattttgatgagcaggtgcggcggtttttaaattttaaacactcagatctattagagtacaccgtggaacccaagattgatggtttatccttatctttacgttacgaaaatggtgagcttgcatttgctgttaccagaggagacggaactaccggagaaaatgttactgcaaatgctttgaaaattgaggatataccaacaaatttaccaacaaaaactgaaattcttgaggttcgtggtgaagtttatatggagcataaagattttgaaattttaaacagtaatcaggcatctttaggaaaaaaggtttttgcaaacccgaggaacgctgctgctggaagtttgcgtcaattagatccagcggtaactgcagagcgccctttgaagttcttggcgtacgcttggggtgaattaagccaacctttagatacaaatcaatttggcgcgatagaaaagttaaaaaatttaggttttaaaaccaattcccatactaaactttgtaaaaatattgacgaggcgctcactcactacgaagaattatcaaaaatacgttcagaattaggatacgatattgatggtatcgtctacaaagttgactcactagatcttcagtctcggctaggctaccggtctacaacacctcggtgggctattgctcataaatttcccgctgaatattcctggacaaagttaatagctatcgacctccaagttggaaggactggtgcgctgagtcccgttgcacgtttgaatcctgtaacggtcggtggcgtggtagtgtcaaacgctaccctacataatcaagattacatagcgggacgggataattatgggaaggaaattagatctgggaaagatattcgagttaacgattgggtagaggtttatagggcaggcgacgtaattccaaaaatttccgacgtagatattacaagaaggcctaaagatagcatggcttatcggttcccctcaagttgtccagaatgtaattcagcagtagttcgagatgaaggtgatgcggttattcgatgtaatgcaggaattaattgcccggcgcaagctattgaaaaaatgaaacattttgtttctcgtaaagcttttgatattgagggtcttggagcgaaacaaatagaaatgttttttgccgatgaggctttgccaatcaaagaaccggtagatatttttactttggagtttcgagatcaaaataactttacaaaattaaaagaccggcacggttttggcaaaaaaagtgctgaaaatctttttgatgcaatcaaagagaaaaaaactatagagtttagccgttttttattttctttggggatccgtcatgtgggtgaaaatgtttcaaaacttttggcacgtcactttttaaaatggtcaaagttcatttcttttatttcactggctcaaaatagagagagccaagagtattttgatctggtgtctatagatggaataggaacgaccgttgttaattcgctgctttctacttttgaaatcggaaaagaaagagatagtatcgaaaaacttgtcgagcatttggatatatcggatgaaaatcttccggatctagacaataacgttctttcaggaaaaaccttggtttttactggaacacttgaacaaatgagccgttcagaggctaaatctttagccgaaaacttcggggctaaagtttcagggtctgtttccgcaaaaacagatctagttatagctgggcctggtgcaggatcaaaaattagaaaagcagaagaacttggagttaaaactttagatgaaattgaatggcttagtttgattggaaagtaa

SEQ ID NO: 319941 - DNA, 1237 bp, Unknown
  Bacterial polypeptide expressing nucleotide sequence isolated from the Sargasso Sea
tttgataaattagtcaaaacgcttcttgttttagagaaagagaatccgcagcttatacaagtagattctccaactcaaagggtcggatcaaaacccatcgatggttttactcaaattgagcatttaactccgatgctatcattagataatgttttctcaatagatgagctaatatcttttgaaaagagagtcaaagacagaatttctttaaaagaaaacattgagtttatcgcagaaccaaagttagatggtgttgcagtaaatttggtctatgaatctggaaaattatcttatgcaacaactagaggggatgggacaactggcgaagacgtcacgcataatattcttacaattaaatcgataccaataaaactgaaatcatcatctccaccaaaaagaatagaaattcgtggtgaagtaattatctcaaaggacgatttcaagaaaatgaacaaagataatgcagataaagacatgaaggtatttgcaaatccaagaaatgcagcagctggaagtatacggcaattagatccaaatatttcacaagagagaccattgaggttttatgcacacggatatgggttattttcagatgagggtaattttgcaagtcatagcgatgtaatgagttatctcagtgacgcaggagtcgtagtgtctccatactcggaggttgtaactggatcctcagaatgcagcagatattatgaaaaaatcgatactattaggcactctcttgattttgaaatagatggtgttgtctataaggtcaataacatatcatatcaaaaagaacttggcttcgtttctaaggcacctagatgggcaattgcccataaattttcttctattgaggttgaatcgaaaattctagacatagacttccaagttggcagaacaggtacaattacacctgtcgcaaaattaaaacctattaatgttggcggcgtgatagttagtaatgcaacactacataacatggatgaaattaatcgcaaagatgttcgtaaaggtgactatgtgtttgtaagaagagcaggcgatgtcattcctgaaattgtttctgtaaatacaagaaaaagaagtaaaaaaacagaagagattattttcccaaaacaatgtccttcatgcggatcagaaattacaaggaaagatggtgagagtgcagtaaaatgcattggaggaaatatttgtccagaccaaagaaaaagagggcctcaaacactttgtttctaga

SEQ ID NO: 319942 - DNA, 1147 bp, Unknown
  Bacterial polypeptide expressing nucleotide sequence isolated from the Sargasso Sea
aactcataatattagaaccataccttcaatacctttatctcttctagaatttaaaattaaggcaccaagcttgatagagataagaggggaagtctttattgatataaaagattttaaggaaataaatgagaaggccaaggttgattctgaaaaaatttttgctaatcctagaaatgctgcagcaggaagtctgagacaattagatcctagggttgctgcatcaagacctttaaagttttttgcgcatggaatcggaagcttagattttggtaagggcactgaacctagaacacaaatggaagtctttgattgctatgttacatggggattgccaataaaccccctggctgaacaggcaagtgatataaatgaatgtatctcttactttaaaaaaatagaaagtttaagaggtcaacttccttacgaaatagacggagtagtctttaaagttaatagttttgatatgcaagaatctctaggccaagtttctagggcaccaaggtgggctatagcaaggaaatttcctgctgaggttggttctacgaaggttaagtctattacttttcaagtagggagggtaggtagcattacaccagttgcagaatttgaaccacttaacttaggaggagtggtagtttcccatgccagcatccataattttgatgaaatagaacgtctagatgtgagagagggagatacggtgcaaatcaagagagctggtgatgtaattcctcaaattatcaaagttgacttatcgaaaagaaaaaaagccttgcagaaagttaagcctccaactacgtgcccttcctgcgataccaaattaattaaactagaaaatgaagcaatacttagatgcaatgctggtacaaattgcccagctcaaaaaacggagtctattagacattatgtttctagaaatgcactcaacattgatggattgggtgaaaggattattgagttgttagtacaaaacaaccttgtttccgatcttccagatttatacctcttaaaaaagaaagatttattagagctagaaggttttgcagaaaaatctgcttcgaagcttttaaattcaatagaaaatagtaaagaaacaactctttctaggtttatctatgctctgggaattagggaagttggggaagca

SEQ ID NO: 319943 - DNA, 1459 bp, Unknown
  Bacterial polypeptide expressing nucleotide sequence isolated from the Sargasso Sea
tatgaaagatattgaaaaaaaaattagaacactaatagatgaaataaactttcataactatcaatatcatggaatggatgatccaaaaatatcagaccatgattttgatcaaatggtaagagctcttcatgatttagagaagaattatcctcaactcattcaagctgattctccgacacaaagagttggatcaaaacccatcgatcgttttattcaaattgaccatttaacaccaatgctttcattggataatgttttcacaaaggatgagttaatctcttttgaaaaaagaattaaagataagctctcgttaaaagaaaatattgagtttatcgctgaaccaaaatttgatggtgttgcagtcaatttagtatatgaatcaggaatattatcatatgcaacaacaagaggtgatgggaaaacaggagaggatgtgacacacaacatcctaacgatcaaatcgatacccataacactcaacacatcatctccccctgagaagatcgaaatacgaggtgaaatcattatttctaagaatgattttgagaagatgaatcgagaaaatgaagctaagaatctaaaggtttttgcaaatcctagaaatgcagctgcaggaagcatacgacaattagatcctaatattgcaaagagtaggccattgcgtttttatgcccatggatatgggtttctttctaatgaaaatgatttcaacaatcatagtgatgtcatcaaatatctaaatgattcaggaattgtgatctcaccgctttcgcagatagtaactggcgctgaagaatgtgataaatattatcagaaaatcgattctactagggattcgcttgatttcgaaatcgatggtgttgtttataaggtcaataaaatttcttatcaaaaagaacttggttttgtctctaaagcaccaagatgggcaattgctcataagttttcttctgttgaggttgaatcaaaaatattagatgtagatttccaaataggcaggacaggaacaatcacaccagttgcaaaactggatccgatcaatgtaggtggtgtaatagttagtaatgcaactctacataatatggatgaaatcagtcgaaaagatattcgcaacggtgatcatgtatttgtaagaagagccggggatgtcataccggagatcgtttctgttaataagaaaaaaagaagtcagcaaacaaaaaaaattgtctttccgaaacagtgcccttcatgtggttcagaaattcttagaaaagacggggagagtgctgctaaatgtactggtgggagtgtctgccctgatcagataaagcagggacttaaacactttgtttctagaaatgcttttgatattgaaggattaggtgaaaaaattatagatcaattattagattctaatttgatcagaaccacttccgatcttttctcattaaattctgatgaattaatatcattgaga

SEQ ID NO: 319944 - DNA, 1788 bp, Unknown
  Bacterial polypeptide expressing nucleotide sequence isolated from the Sargasso Sea
ctttattaaatctaaacatagagttaaaatgctgtctttatcaaatgcttttgatgcagaggacttagaaaattttgagaagaaaatatttaattacttaaataaaaaaattgtactcgaatacagcgtagaaccaaaaatagacggaatttcagcttcattaacttataagaatggtttgttgattatgggtacatctaggggtgatggaacaacaggtgaggtcataactgaaaatttaaaaacaattaaagatatacctcagaaaataacttctaaggattttccgaaagatatagatataaggggagaagtctttattaagagaagtgaatttgataaattaaaaaatgattttgcaaatcctagaaatgcagcttcaggatccctaagacaaaaaaatccaaatgaaactaaaaaaatcccacttaatttcgttgcctatacttacggttatttcaaaagtggcgaaataagaaaacaatcagattttttaaactccttacaaagatggggttttaagacaaatgagcacaataaaattttaaacagtatagatgatttgataaattttcataaaaaatttgaaaaagaaagatttgatttagaatatgatgttgatggtttagtttataaaataaatagtctcgaacttcaaaaaagattaggatttacagcaaattctccaagatgggcaatagctcataaattttctgcagatagcgcattttctcaaataatagacataaatattcaggtcggtagaacaggtgctttaacacctgtagcaagaataaaaccagtaaatattggcggtgtggtagtttctaatgcaacactccataacgaggatgaaataattagaaaagatattagacttcatgataccgtaaaaatagaaagagcaggtgatgttattcctcatgttatttcagttgatcttaaaaaaagaaaaaaaagttcaaaaaaatttgtttttccaaaaaaatgtccttgtggttttgatacaacaaaggaatttaataaagtaactaataaatttgatgcagtaagaagatgtccagatagaggatttgagtgtgaaaaaatggcagtagaaaaaattaaacattttatatcaaaagaagctcttaatattgatggtcttggaaaaaaagtagtagaaaagttttgggatcttaaattaataagatttccacaagatatttttaatttagattatactcaaatttctaaattagaaggttggggtgatctttctgtttcaaatttaaaattttcaataaatcaatcaaaaaaagtttctttagataagtttctttattctatcggtattagacatattggtatagagaatgcaaaattattggcagaatatacaatatcaatatcgaactttttaaattttattaaaaataaaaaaattaatgaatttttaaatatagatggaataggagatactcaaattaattccttaaaaaagttttttgaaaataaatctaattataaaataattgaaaaattatcttctatactaaatatttctgatttaaaattaaataagaatggtaaacttttaaataattcatttatgtttactgggaaattatcaaatatgagtagagctgaagcaaaatctttaattgaagaaaattcaggatcagttgtaagttctattaataaaaaattaaaatatttgattattggtgaaaaacccacaaacagaaaagtggaacaagctaaagagctgggtataaaaattttatctgaaaaagaatggcttaattt

SEQ ID NO: 319945 - DNA, 1422 bp, Unknown
  Bacterial polypeptide expressing nucleotide sequence isolated from the Sargasso Sea
catttgcaaacccacgtaatgccgcagcaggaagcttacgtcaattagatccagcgattacagcagaacgacctctgtctgtatatttttatgaatctggccttgttgaaggactaatatttgaaactcatctatcatttttggagtccataaagttgttgggatttccggtcaatccacttattaaacctgtagtagatgatcaaggaatgatcaattaccatgaacaaattgaacaaaaaagaaacaagttgccctatgagatagatgggactgtttttaaaattaatgaatacagtctaagaaataagttaggggctagaagcagatctccacgctgggcaattgcggggaaattcaagggccaacaagcaacaaccaccatcaaagacatagagacccaagtaggccgtactggcgcacttacacccgttgctaagcttgaacccgtgtttgttgccggcgttaccgttagtaatgcaacactacataatcaagatgagatcgatcgtaaagatattagaattggtgatacggtgttaattgaaagagctggagatgtcatacctaaggtcatcaaggtaattaaagataaaagaccaaatgcttcattgccttttcatattcctacaatatgtcccgtctgcgatcagaaggcataccgttctgaggatgaagccgtatggcggtgcagcaatattgcatgcagcagacagatcaaagcgcggattcaacatttcgcctctaaatcagcaatggatatagatggcttaggtgaaaaagttgtagatcaattggtagagaagggaatgattaattcaattagtgacctttatttaattgctaaaaataaactttcaaaaattgaaagatttggagaaaaatcatctgaaaatttgatactggcaattgaaaaatcaaaagagaccacattctctcgctttgtttatggattaggtataagaaatgtaggtgagcatatctctagattacttgaaagtaattttaatggagaccttacacaattttctgaatcaaatatagatgaattagaatcaattgagggcatagggcccatagttgctaaagaaattgtgaatttctggtcaaataaaacaaatatgacaatagtaaatgaatgtttagaaagaggcgttactttaaaatgggaatcaggttctcaaggtaattttcttgaaggtgcgatatttgtttttacggggtcattagaaaagttaaaccgaaaagaagctcaggaaaaagtgtatagcctaggagggaagacctcttcatctgtgagcaagaaaacaaaatatgttgtcgccggtgccggctctgggtcaaaactcatcaaagcagaagatttaagcattaaaatcataagcgaagatgaatttttgaatatgatcgatggcaaataaa

SEQ ID NO: 319946 - DNA, 1705 bp, Unknown
  Bacterial polypeptide expressing nucleotide sequence isolated from the Sargasso Sea
tggtgggcgagctcagattgacggcaatgctctggccctgagctaccgccatggggtgctggagcgggcagcaacccgcggcgatggcagcagcggtgagcagatcaccgccaatgtgcgcaccatcagttcgattccgctgcggctgcagatcgaggatccaccggaatgggtggaggtgcgcggggaagccttcatccccgatgacaccttcacggcgatcaacaacgaacgcgcagcccgcggcgaagccctgtttgccaacccccgcaacgcctgcgccggcacgttgcggcaactggatcccaaggtggtggcggcccggagacttgatttctttgcctacacgctgcatctgcccagtgacgcctccaacagacccgaatgccagtgggacgtcctggcttggctggagcaggcggggtttcgcgtcaatcccaaccgcgagctctgcgatggcttgaacggaatcgaacgcttctgcgaccgctgggagcagcaacgtcatcagctgccgtacgccaccgatggcgtggtggtgaagctcaacgacctgcgtcttcaagatgaggcgggcaccacccagaaggccccccgctgggccattgccctgaaatatccagcggaagaagcccccagcaagctgctgaagctggtggtacaggtaggacgcaccggcgccgtgacgccggtagccgaattcgagccggtgaccctggcgggcaccagcgtcagtcgcgccaccctgcacaacgctgatcgcatcgccgaactggatctgcacctcggtgacacggtggttgtgcgcaaagccggagaaatcatcccggaggtggtgcgggtgctgccggaactgcggcccgaaggagccgtccccctggacctgccggaccactgtccggaatgcggttccaccttggtgcgcgacgacagcgaagcagccacccgctgcatcaacagcagctgcccagcaatcctgcggggcggcttgcgccactgggtgagcaagggcgccctggatgtggacggactcggcagcaagctgatcgaacagctggtggagcgaggtctggtgcgctccatcgccgacctttaccggttggatgcagccctgctggcaagtctggagcggatgggcgagaaatccgccaccaacctggtggcggcactcgaacaatccaaacaacagccctggcatcgccagctgtatggcctgggaatccgccacatcggcgaagtgaacgccaaagctctagcgacggtatatcccagcagcgccagcctggccactgctgagccagaacgcatcgccgcactgcacggcatcggccctgagatcagcagaagcctgcagcaatggcacaccaacccctccaacacaagactgctggaggatctgagggcggtcggtctgtcgctggaagccaatgcttcggaactgaacgccaacggcaccggcgaagacaacagcgccggggtgcttttcggaaaaaccctggtactcacgggcaccatgcccaacctcagccgcagtgacgccaagtccctgattgaagccgccgggggcaaggtgagcggcagcgtcagcaagaaaaccgattacctggtagcgggagatgcagccggcagcaagctgtctaaagctgaaagcctggggatacaggttctcaacgaagcggaactagaagaactactgaagtcatga

SEQ ID NO: 319947 - DNA, 727 bp, Unknown
  Bacterial polypeptide expressing nucleotide sequence isolated from the Sargasso Sea
cttgggctgggcagaggcctatttcgagcgagatgcgccggtggtgcctgacgcagattacgaccaggccatgaagcaactggaggcactcgagcgggagtttcccgatctggtgacgcctgattcaccgactcaacgcgtcggctcagcgccattgagtgagtttgagtccgtggagcaccgtttgccgatgctctccctagataatgcgttttcttctgacgatatggacgacttccaccgccgcgtcacggagcgtctgggtactgttgaagtgtcctactgctgcgagcccaagctcgatggtgtcgccgtcagtgtcgtttatgaaaacggtgcactggtgctggctgccacccggggtgacggtacccgcggtgagaacatcacggcgaacgtccgaacgatcaggaacgtgcctttgacgctgagtggtgagagcgtgccgccgtaccttgaagtcaggggcgaggttgtgatcccgcgtgatgcgttcgagcgaatgaatgcgcaggccagaggcgccaatgagaaggtattcgtgaacccacgaaacgctgctgccggcagcctccggcagttggatccacggattaccgccagacggccgctggccttcaccgcctattcagtgggcgtggtggagagtgacttacccgctactcatgacgccatcttgcgccggcttagcgattggggcctgcccatttcggagtacactcaaacg

SEQ ID NO: 319948 - DNA, 889 bp, Unknown
  Bacterial polypeptide expressing nucleotide sequence isolated from the Sargasso Sea
aaaacttgatgggttagcggtatctattatttatcgtgatggagtgttggtacaagctgcaacacggggtgatggctttacaggtgagaatattactcaaaatgtaaaaacaattcgtaacgttccccttaagttgcgtggtgactaccccaaagagcttgaagtgcgcggtgaagtatttatggacagcgctgggtttgaaaagctaaacaatgaagcgcaaaagcgtggcgaaaaagtatttgtaaatccacgtaatgcggcggcaggtagcctacgccagctagactctaaaattaccgcaaaacgcccactgatgttttatgcatacagtactggtttggttgctgatggctcaatccctgaggatcactttcagcaattagaaaagctaactgattggggcttacccctttgtccagaaacaaagctggtggaagggccacaagctgcacttgattattatgatgatattttaacgcgtcgcagtgagcttaaatatgaaattgacggcgtagtaataaaagttaataaaaaagccctacaagagcgtttaggctttgtagcgcgggcacctcgttgggctattgcctataaatttccggcgcaagaggaagtcactcaactccttgatgtagaatttcaagttggtcgtacaggtgcaattacgcctgttgctcgtttagaacctgtgtttgtaggcggtgtaacggtgtctaatgcaacgcttcacaatggtgatgaaattgctcggttaggcgtgaaagtcggcgatacagtgattatacgccgtgctggtgacgtgattccgcagataacacaagttgtgcttgaacgcaggcccacagatgcaagagacattgtgtttccatcagcttgccctatttgt

SEQ ID NO: 319949 - DNA, 1393 bp, Unknown
  Bacterial polypeptide expressing nucleotide sequence isolated from the Sargasso Sea
cagagttggcgaagtgagtttttgctgtgatcctaagcttgatggtttggcggtgagtattttgtatcgcaatggtgtgcttgagcgcgccgcgacccggggtgatggtaccgtgggtgaggatattaccgaaaacgttaaaaccattaagtcgattccgctcaaactgcgtggtgacaactatcccgaattggtcgaagtgcgcggcgaagcctttatgcccaaggcggcgtttgaggcgctaaatgagcgtgcgcgcttaaaggatgaaaaactgttcgtaaatccgcgtaatgcggcggcgggcagcttacgtcagctcgacagtaaaattaccgcgtcacgggcgctgtcgttttatgcctacgccttaggtgtggtggagccgacgtcccacgaattagctaagacccactacgagcaattgcagcaacttaaatcttgggggctgccagtcagcagcgagattaaagtctgcgacgaactcagccaagtctttgcctactatcaagatatattgactcgccgcgccgacttaccctttgagatcgatggcgttgtgatgaaggtgaacgatattgcccagcagcaaaccttagggtttgtggctaaatctccccgttgggcgattgcctataagttccccgcacaggaagaaatgacgctgctcgaaggcgtggattttcaggttggccgcactggcgcggtgactccagtcgcgcgcctaaaacctgtgtttgtcggtggtgtgacggtatcgaacgccaccttgcacaatgccgatgaaatcgctcgtttaggtgtaatggtgggtgatactgtgattatccgccgcgctggcgatgtgatcccgcaaattgtcgccatagtgcccgagcgccgcccagaagatgctaaggcgattgccttcccgcaacattgccccgtttgcggcagtttagttgagcgattagaaggtgaagccgtggcccgttgtagcggcggcttattctgtgaggcccagcgtaaagaggcgatcaaacattttgcctcccgcaaggcattagatatcgacggcatgggcgataaaattgtcgagcagttgattgataaggagctggttcaaagccccgctgacttatttaaactcaccgcctctatgatgaccatgctcgaccgtatgggaatgaagtcggccaccaatctcgcgctggcgattgaagcggctaaaaccacgactttgccacgttttctctatgccttaggcattcgtgaggtcggggaggccacggcggcgaacctggcgactcactttggcagcctagaggcgctgcgcgtggctaccattgagcaacttattcaagttgaagatattggtgaagtggttgcccagcatgtggcgcatttctttgcc

SEQ ID NO: 319950 - DNA, 1506 bp, Unknown
  Bacterial polypeptide expressing nucleotide sequence isolated from the Sargasso Sea
aatggctgatccgcacgagcgggccgcggaactgcggcacctgctcaaccgtgccggccacgcctattacgttctcgatgctccgttaatggaggacgcggtctacgaccgcctctatcgcgagctgctcgagctggaacagaaccatccggacctgcaacggcccgacagccccacccagcgggtgggcggagctccggccgaagggttcaccagcgttgagcaccgcgtgggcatgctcagcctcgacaacgccttcaaccgcgacgacctgcaggcctggcacgagcggctgctcaaggtgctggaccgtcccagcgacacccacctgcccctggtgggggaactcaaaattgacggcaacgccctggccctgagctaccgcaatggggtgcttgaacgggccgccacccggggcgatggcagccgcggtgaaaagatcaccgccaacgtgcgcacgatcagctcgattccgctgcggctgcagatcgagaacccaccggaatgggtggaagtgcgaggggaggccttcatccctgatgccaccttcgcagcgatcaatgccgaacgggagcaacggggtgaagcgctgttcgccaatccccgcaacgcctgcgccggaaccctgcgccaactggatccgaaggtggtggccgcccgccggctcgacttcttcgcctacaccctgcacctgccgggtgacgcccaaccccccggccaatgggcggctctggagtggctgaacagggccggtttccgcgtgaacccgaaccgggagcgctgcgaagacctggccgctatccagcgcttctgcgaccactgggagcagggacgtcatgacctcccctatgccaccgacggcgtggtggtgaagctggacgacctgcagctgcaggacgaagccggcttcacccagaaggccccgcgctgggccatcgccctcaaatacccagccgaagaagcccccacccgtctgctccgcgttggtgctcaggtgggccgcaccggtgccatcaccccagtggctgaattcgaagcagtcgcgctggccggcaccagcgtcagccgcgccaccctccacaacgccgatcgaatcgcagaactggatctgcacctgggcgacaccatcgtggtgcgcaaagccggggagatcattcccgaagtggtgcgggtgctgccggagctcaggcccagtgacgccaccccggtgcaactgccgcagcactgccccgaatgtggctccaacctggtgcgagagggagatgaagccgccacccgctgcgtgaacagcagctgcccggcgatcctgcggggtggcctgcggcactgggtgagcaagggtgccctggatgtggatgggctcggcagcaagttgatcgaacagctggtggaccgcggcctggtgggctcgctggccgatctctaccgcttggatgaggccctgctcgccagcctggatcggatgggcgacaagtcggccaccaacctggtggaggccctggaggc

SEQ ID NO: 319951 - DNA, 2071 bp, Unknown
  Bacterial polypeptide expressing nucleotide sequence isolated from the Sargasso Sea
atgcaagacattcaactcgataaacgcctatctgaactgctttctcaagctgtcacgccacacaatgcgcagccattgatgcaggcgctctgccaatctctgaatgaacacaatattcgttactatgtcgatgatgcgccaagcattaccgactccgaatacgacagattaatgcagcagctgaaacaacttgaggccgagtatcctcagtttgttgctgccgactcgcccacccaaagagtgggcggcatggcactggccaagtttgagcaaattactcatcttaagcctatgttaagtctcgataatgccttcgatgaggcagactttagcgcgtttcataaacgtgtcagcgacagagttggcgaagtgagtttttgttgtgagccgaaactcgatggtctagcggtgagtattttgtatcgaaatggtgtgcttgagcgcgccgcgacccggggtgatggaaccgtgggtgaggatattaccgaaaacgttaaaaccattaagtcgattccactcaaactgcgcggtgacaactatcccgaattggtcgaagtgcgcggcgaagcctttatgcccaaggcggcgtttgaggcgctaaatgagcgtgcgcgcttaaaggatgaaaaactgttcgtcaatccgcgtaatgcggcggcgggcagcttacgtcagctcgacagtaaaattaccgcgtcacgcgcgctgtcgttttatgcttatgctttaggtgtagtggagccgacttctcacgaattagctaagacccactacgagcaattgcagcaacttaaatcttgggggctgccagtcagcagtgagatcaaagtctgcgacgaactcagccaagtctttgcctactatcaagatatattaactcgccgcgccgacttaccctttgagatcgatggtgtggtgatgaaggtgaacgatatcgcccagcagcaaaccttagggtttgtggctaaatctccccgttgggcgattgcctataaatttcccgcgcaggaagaaatgacgctgctcgaaggcgtagattttcaggtcggccgcactggcgcggtgactccggttgcgcgcctaaaacctgtgtttgtcggtggcgtgactgtatcgaacgcgactttgcacaatgccgatgaaatcgcccgtttaggtgtgatggtgggtgatactgtgattatccgccgcgccggcgatgtgatcccgcaaattgtggccatagtgcccgagcgtcgcccagaagatgctaaggcgattgccttcccgcaacattgccccgtttgcggcagtttggttgagcgattagaaggtgaagccgtggcgcgttgcagtggcggcttattctgtgaggcgcagcgtaaagaggcgatcaaacattttgcctcccgtaaggcattagatatcgacggcatgggcgataaaattgtcgagcagttgattgataaggagctggttcaaagccctgctgacttatttaaactcaccgcctctatgatgaccatgctcgaccgtatgggaatgaagtccgccaccaatctcgcgcaggcgattgaagcggctaaaaccacgactttgccacgttttctctatgccttaggcattcgagaggtgggggaggccacggcggctaacctggctactcactttggtagcctagaggcgctgcgcgtggccaccatagagcagcttattcaagttgaagatattggtgaagtggttgcccagcatgtggcgcatttctttgcccagccccataacctagaagtgatcgatgccttgattgcggctggcgtcaactggcctgcaattgcagcgccaagcgccgatgagcaaccattgaaggggcagacttgggtgctaacgggcaccttaaatcaactcaaccgtaacgatgctaaggcgcaattacaggccttaggcgccaaagtcgcgggcagtgtctcgaaaaataccgattgtttagttgcgggtgaagcggcggggtctaagcttgccaaagcgcaggagcttggcgttaaagtgattggtgaagatgaattattggctcttctagcagcaaatagctaac

SEQ ID NO: 319952 - DNA, 2023 bp, Unknown
  Bacterial polypeptide expressing nucleotide sequence isolated from the Sargasso Sea
atgaaagacttattaaaaaaatacgaacaacttaaagaggaaattcagcttcataattacaattatcatgccctagatgacccaaaaatatcagatagtgagtatgataagctctttcgaagtttgcttgatttagaagaagaaaatcctcaacttgtgactccagattctcctacacagcgggtaggattttctccaatagatgaatttgaaacatttgagcattctgtgccaatgctctctttggctaatgtatttagtgaaaaagagttttcagatttccatgaccgtattttaaaacgtcttgtaaatattaatgattttgagtacttctgtgagcccaagatggatggagccgcagtatcactaatttacaaaaatgggatactagaaagggctttaacaagaggagatggcagggttggtgaagatatctcccaaaatgttaagacgattaggtcaatacctcaaaaactatcatcttctgaagctaacattccctctttattggtaataaggggagagatatttatttcaaaagatgccttcgaaaaaatgaatgaaaaagctaaggaaaataatgaaaaggtatttgccaatcctagaaatgctgcttcaggatctcttcgacaacttgattcaaagataacttcaagcaggcccttgtcttttattgctcatggactaggtgagtgcgaaggaatccaattttcttcaatatctgaattttatgatcatttaaaagcatggaaaatacctacaagtgatttatgtaagaaggttgaaactaaagatgattgcttgaaatttcatgacaaaattcttaaagaaagagaatctattccctatgagattgacggcgtcgtttttaaagttaatgactatgatcttcaaaaaagacttggttttatatcaagagcgcctcgatgggctatagctcataaatttcctgcagaggaggcaacaacgattttagaagatattgaattccaagttggaagaactgggattctaactcctgttgctagattacaaccagtcattgtaggaggcgtaactgtcaagaatgccactttgcataatattgatgaaatcagaagattaggaattgatgttggtgatagggttattcttagaagagccggcgatgtaataccaaagattgtgaaagtggctgaaaagggaatatcaaacaaaaaattagagattcctaaaaagtgcccttcatgcgatgctgatgtaatcttggtaaatacctcagatttaaaatgctcaggtggatttaattgtgatgaaatccaaaaaggtcagattgttcatttcgtatcaagaaaagcttttgatattgaaggtttaggaatagagataataaatacgttttttaagcaagggtttttaaaagatccaagcgatatatttaagcttgaaaatagaaaagatgaaatagttagtttagaaggctttggtgaaaagtcttttgataaccttataacatcaattaaagcctctcgagatatatctcttcacagatttatttattccttaggtatacctgaggtcggtgaatcaactgctagaaaccttgaaagtcattttgaaaaatttaaaggaatttttgaagctacctatgatgatctcattgaagtaaaagacattggaccaaaggttgctgaaaatatcattcagttttttcagaatcctctaatagttgaaatggtgccaaagctattagaagaaattgctctgcaagaattatcgaaggaagatttcaaggacatgcctttgagaggaaagcaaatagtgcttactggtaaattagagaattattcacgagatgaattaaaggaaatcctcattagcatgggagcaaatgttacttcatcagtctcatcaaagacttcgcttctgatagctggggagaaggctggctccaaacttaaaaaggcagagtctttaggtattgatataataaatagtgatcagtgtgaggaattcttaaatgatacaaaaaaatttctttaaa

SEQ ID NO: 319953 - DNA, 824 bp, Unknown
  Bacterial polypeptide expressing nucleotide sequence isolated from the Sargasso Sea
aatggctgagccacagcagcggaccgcggaactgcggtccctgctcaaccgagctgcccacgcctactacgtcctcgatgccccggtcatggaggacacggtctacgaccggctgtaccgggaattgcagcagctggagcatgacgacccaagcctgctcagtgctgacagtcccacccagagggtgggcggagcaccggcagcgggcttccacagcgttgaacacagaatcccgctgcaaagtctcgacaacgcctttgatcagggggaattgagggcctggcatgaacgcctgctcaaggtgctggaccgggctgacgacagccccttacccctggtgggtgagctcaagattgacggcaatgccctggccctgagctaccgccatggggtgctggagcaggcagcaacccgcggcgatggcagcagcggtgaggagatcaccgccaatgtgcgcaccatcagttcgatcccgctgcggctgcagatcgacgatccaccggaatgggtggaggtgcgcggggaagccttcatccccgatgacaccttcacggcgatcaacaacgaacgcgcagcccgcggcgaagccctgttcgccaacccccgcaacgcctgcgccggcacgttgcggcaactggatcccagggtggtggcggcccggagacttgatttctttgcctacacgctgcatctgcccagttacgcctccaacagacccgaatgccagtgggacgtcctggcttggctggagcaagccggctttcgcgtcaatcccaacggcgagctctgcgatggcttgaacggaatcgaacacttctgcgacc

SEQ ID NO: 319954 - DNA, 1750 bp, Unknown
  Bacterial polypeptide expressing nucleotide sequence isolated from the Sargasso Sea
tatggaatcaatcgaacaacaactgacagaactgcgaaccacgcttcgccatcatgagtatctctaccatgtgatggacgcgccggaaattcccgatgcggaatacgatcgtctgctgcgcgaactccgcgagctggaagcgcagcatccggaccttattacccctgactcgccaacccaacgcgttggcgccgccccgttaacggcgttcagtcagattcgccatgaagtgccgatgctgtcgctggataacgtgtttgatgaagagagttttctcgcttttaacaagcgcgtacaggaccgactgaagagtacggacaaactaacctggtgctgtgagctgaagcttgacgggctggcggtgagtattctctatgaaaacggcgtgctggttagcgccgcaacgcgcggcgatggcaccaccggggaagacattacctcgaacgtgcgcaccattcgtgcgatcccgttaaaactgcgcggcgataacattccgacgcgtctggaagtgcgcggcgaggtgttcctgccgcaggccgggtttgaaaaaatcaacgaagaggcccgccgtactggcaacaaagtgtttgctaacccgcgtaatgcggcggctgggtcattacgccagctcgatccgcgtatcactgcgaagcgaccgcttactttcttctgctatggcgttggtgtgctggaaggtggtgtgctgcccgatacccatctgggccgtctgctgcaatttaaagagtggggattgccggtgagcgacagagtggcgctttgcgactctccggaggaagtacttgcttactatcataaggttgaagaagaccgaccgacgctgggattcgatatcgatggtgtggtgatcaaagtcaactctatggccttgcaggaacaactgggttttgttgcccgcgcgccgcgttgggcggtggcctttaagttcccggcgcaggagcagatgacctttgtccgcgatgttgagtttcaggttggacgtacaggggcgattacgcctgtcgcccgccttgagccagttcaggttgcaggggtgttggtcagtaacgccaccttgcacaatgcggatgaaattgagcgtcttggtttgcgtattggcgataaagtcgtcattcgccgtgcgggcgatgtcatcccgcaggtagtgaacgtcgtgctttccgagcgcccggacaatacccgcgaaatcgagtttcccacccactgtccggtatgcaactctgacgttgagcgtgtggaaggcgaagcggttactcgttgtaccggaggtttaatctgcggggcacagcggaaggaatcattgaaacacttcgtttcccgccgtgcgctggatgtcgacggcatgggcgacaaaattattgatcaactggtcgagaaagagtatgtccatacgccagcggatctcttcacgctgaccgcaggtaagctgaccggtcttgatcgcatggggccgaagtcggcgcaaaacgtagtgaatgcgctggaaaaagcgaaagagaccacgtttgcccgtttcctctatgcgctgggtattcgtgaagtcggcgaagcgacggctgcaggtctggcggcatatttcggcacgctcgaggcgctggaagccgcctctgttgaagagctgcaaaaagtgccggatgtcggcatcgtggtggcgacccacgtgtttaatttctttgccgaagagagtaaccgcgaggtgatcgtccagcttttggagcaggggattcactgg

SEQ ID NO: 319955 - DNA, 2071 bp, Unknown
  Bacterial polypeptide expressing nucleotide sequence isolated from the Sargasso Sea
tatgcaagacattcaactcgataaacgcctatctgaactgctttcacaagctgttacgtcggaaaatgcgcagccattgatgcaggcgctctgccaatctctgaatgaacacaatattcgttactatgtcgacgatgcgccaagcattactgactcagaatacgacagattaatgcagcggctgaaacagcttgaggccgagtatcctcagtttgttgctgccgattcgcctacccaaagagtgggcggcatggcgctggcaaagtttgaacaaattactcaccttaaacccatgttaagtcttgataatgccttcgatgaggcggactttagtgcatttcataagcgtgtcagcgacagagtggggcaagtgagtttttgctgtgagccgaaactcgatggtttggcggtgagcattttatatcgcaatggggtgcttgagcgcgccgcgacccggggcgatggcactgtgggcgaagatattaccgaaaacgttaaaaccattaagtcgattccgctcaaactgcgtggtgacaactatcccgaattggtcgaagtgcgcggcgaagcctttatgcccaaggcggcatttgaggcgctaaatgagcgtgcacgcttaaaggatgaaaaactgttcgtaaatccgcgtaatgcggcggcgggcagcttacgtcagctcgacagtaaaattaccgcgtcacgggcgctgtctttttatgcctacgccttaggtgtggtggagccgacttcccacgagttagctaagacgcattacgagcaattgcagcaacttaaatcttgggggctaccagtcagtagcgagattaaagtctgcgacgaactcagccaagtgtttgcctactatcaagatatattgactcgccgcagcgatttaccctttgaaatcgatggtgtggtaatgaaggtgaacgatatcgcccagcagcaaaccttagggtttgtggccaaatctccccgctgggcaattgcctataaattccccgcgcaagaagaaatgacgctgctcgaaggcgtagattttcaagtgggccgcaccggcgcggtgactccggtcgcacgcctaaaacctgtgtttgtcggcggcgtgacggtttcgaacgcgactttgcacaatgccgatgaaatcgagcgtttaggtgtgatggtgggcgataccgtgattatccgccgcgccggcgatgtgatcccgcaaattgtggccatagtaccagagcgtcgccctgaagatgctaaggcgattaccttcccgcaacattgccccgtttgcggcagtttggttgagcgattagaaggtgaggccgttgcccgttgtagcggtggcttattctgtgaggcgcagcgtaaagaggcgatcaaacattttgcctcccgtaaggcattagatatcgacggcatgggcgataaaatcgtcgagcagttgattgataaggagttggttcaaagcccggcggacttatttaaactcaccgcctctatgatgaccatgctcgaccgaatgggaatgaagtcggccaccaatcttgcgctggcgattgaagcggctaaaaccacgactttgcctcgtttcctctatgccttaggcattcgagaggtgggggaggccacggcggcgaaccttgcgacacactttggtagcctagaggcactgcgcgtagctaccattgagcaactcattcaagttgaagatattggtgaagtggttgcccagcacgtggcgcatttctttgctcagccccataacctagaagtgatcgatgctttgattgcggctggtgtcaactggcctgcgattgcagcgccaagtgccgatgagcaaccattgaaggggcagacttgggtgttaacgggcaccttaaatcagcttaaccgtaacgatgctaaggcacagttacaggctttaggcgccaaagtggcgggcagtgtgtcgaaaaataccgattgcttagtggcgggtgaagcggcgggctccaagcttgccaaagcgcaggagctaggcgtgaaggtgattggcgaagacgaattgctcgcgctgctcgctgccaatacctaa

SEQ ID NO: 319956 - DNA, 1141 bp, Unknown
  Bacterial polypeptide expressing nucleotide sequence isolated from the Sargasso Sea
aatgaaagacttattaaagaaatacgaacaacttaaagaggaaattcagctacacaattataattatcatgcgctagatgatccaaaaatatcagatagtgagtatgataatctctttcgaagcttgcttgatttagaagaagaaaatcctcatcttgtaacttcagattctcctacacagcgggtaggattttctccaatagatgaatttgaaacatttgagcattcggtaccaatgctttctttggctaatgtatttagtgaaaaagaatttttagatttccatgaccgtattttaaaacgtcttgtaaatattgatgattttgagtacttctgtgagcctaagatggatggcgctgcagtatcactaatttacaaagatggcatactgcaaagggctgtaacaagaggagatggcagagttggtgaagatatctcccaaaatgttaagacgattagatcaattcctcaaaaattatcatcttctaaagctaatgttccctccttattggtaataagaggggagatatttatttcaaaagatgctttcgaaaaaatgaatgagaaagctatgcaaaataatgaaaaggtatttgccaatcctaggaatgctgcctcaggatctcttcgacaacttgatcctaagattacttcaagcaggcccttatcttttattgctcatgggctaggtgagtgtgaaggaatccaattttcttcaatatctgaattttatgatcacttaaaagcatggaaaatacctacaagtggtttatccaagaaagttaagactaaagatgattgcttaacatttcatgacaaaattttagaagaaagagaatctattccttatgagattgacggcgtcgtttttaaaattaacgactatgatcttcaaaaaagacttggttttatttccagagcacctcgatgggctatagctcataagtttcctgcggaggaggcaacaacaatcttagaagatattgaattccaagttggaaggactggaatcctaactcctgtggctagattgcaacctgtcattgttggaggcgtaactgttaagaatgctactttgcataatattgatgaaattaaaagactaggaatcgaaattagcgatagggttatcttaagaaga

SEQ ID NO: 319957 - DNA, 1378 bp, Unknown
  Bacterial polypeptide expressing nucleotide sequence isolated from the Sargasso Sea
tctttagaacaagcaaagcaacaaatagcaacacttcgcaacacacttaatgagtacaactatcagtactatgtgatggatgacccttcggttcctgattcagtatatgatagagatatgcaggcgcttattgcgctagaaaaacaatatcctacgcttcaaagcccgaattctcccagtcaaaaagtagggggcgcagcgttatcggcctttgaacaagttacccatgatgttcctatgctgtcgctggataacgcctttgatgaagaatcactgcttgccttcgaaaaacgtttaaaagacagactaaaagattcggcaacgttagattttagctgcgaacccaagctagatggtttagcggtaagtattctgtacgaaaatggtgaattagtgcgtgctgcaacccgtggtgacggtcaggtaggagagaatatcacggctaacgtgcgtaccatctctaatgtgccgttaacgcttcgtggtgagcattatcctgagcgcgtagaagtgcgcggtgaagtgtttatgcctcgtgagggctttgcaaaactcaacgaacaccaaaaagaaacgggtggtaaggtttttgccaaccctcgtaatgctgcggccggcagtttacgacagttagactctaaaattacggccaagcgcccgctgatgttttatgcttattcgctaggcgtagtgcaacccgaaagttttgaattgcccacaacacacagcgagcgccttaagcaattgggtaattgggggctgccgctgtgccctgatatcgacaccgccgagggcggtaaaggctgcttggcgtactacaaccacattctggaaaagcgcgacagtttgccatacgacattgacggcgtggtgtttaaggtaaaccgtattgacctgcaaaatgcccttggctttgtggctcgagcgcctcgctgggccattgcacagaagtttcctgcacaagaagaagtaactaagctacttgacgttgagtttcaggtaggaaggactggtgcaatcacgccggttgctcgtttagagcccgtgtttgtaggcggagttacagtatctaatgctacacttcacaatcaggacgaaatttccaggttaggcgttaaagttggcgacaccgtggtaatccgccgtgcaggtgacgttattcctcaggtggtgtctgtggtagaagctaatcgcacaggtagcgaaactgacattagcttcccaagccaatgcccggtttgtgactcgcaggttgaaaaactagaagatgaagcggttgctcgttgcaccggtggactaatttgtgccgcacaacgcaaacaggcgcttaagcattttgcttcgcgtaaagcattcgatattgatggtctgggcgaca

SEQ ID NO: 319958 - DNA, 1059 bp, Unknown
  Bacterial polypeptide expressing nucleotide sequence isolated from the Sargasso Sea
tgtaagtcacttttaatagcaacttataatcctgaagaaggtgctttaagagatcatgttttagatcgttttgctattgtgctttccgcagatcaatctattgataatgctcaaagagttgagattacaaaatctgttttatcacatgcagaaaataatattaaattttcagaaaaatggtcggaagaatctgataatttatctactcaattaattttggcaaggcaatggttaaaggatgtcaagataacaaaagagcaaataacctatttagtgaatgaagctcttaggggaggagtagaagggcataggtcagaattatttgcagtaaaagtagcaaaggctaatgcagctcttcgaggcgatgagaatgtgaattctgaagacctaaaagtcgcagtaaggttagttattcttccaagagcaatgcaagtgcctccagatgatgatattcagccaccccctccagaggatcagagtcccccacctccacctcaatcaaataatgaagagtctgaacctgaagctaatgaaaatgatgataatcaagagcaagaacaagaggaagataattctgatggagaagaagaatctactcccgaaattcctgaagaattcatattagatcctgaggcatgtatggttgatcctgatttattgcttttttcatcagctaaagctaaagcgggaaatagcggtagtagatcagtcatatttagtgatagcagaggaagatatgtaaaacctattattccaagaggtaaagtaaaaagaattgctgtagatgctactcttcgggctgctgctccttatcaaaaatcgagaagaataaggaaccctaataaatcaatagttattgaagaaaatgatttcagggcaaagcttcttcaaaaaaaggcgggggctttagtaatttttctcgttgatgcaagtggctctatggctttaaatagaatgcaaagtgccaaaggcgctgtaataagacttttaacagaggcatatgaaaatagagatgaagtagctcttattccttttagaggtaaccaggccgaagtgctt

SEQ ID NO: 319959 - DNA, 586 bp, Unknown
  Bacterial polypeptide expressing nucleotide sequence isolated from the Sargasso Sea
aatgacatcaaatttccccttttcggctattgtcggtcaagagactatgaagcaagctctgatacttacagccattgatccatctatcggaggcgtattagtttttggggaaagaggaactgggaaatctaccatagtcagatctctaaccgccttattacctgagataaaggctattaaaggatgtccatacaattgttacgaagtcagcacagagtgcctcttctgtgaggcacaaaaaaatggacgaagggaaaaaaaatctacccctatcgtagatttaccacttggctcaactgaagatagagtggtcggagccttaaatttagagattgcccttagccaaggcaaaaagagttttgaaccaggattactcgccaacgccaataggggttacctttacatagatgaagtaaatttactggaagaccacatagttgaccttttactcgacgtcgcagcatcaggtgaaaatctagtggaaagagaaggactttcaatcaaacatgaatcaaaatttgtgctggtaggttcaggtaatccagaagaaggcgaactaaggcctcagctccttgatcgatttggt

SEQ ID NO: 319960 - DNA, 730 bp, Unknown
  Bacterial polypeptide expressing nucleotide sequence isolated from the Sargasso Sea
atgaaatttccatttccattctccgcaatagtcggacaggaagaaatgaaacaagcaataatcctcacagcaatagatccctcaattggtggagtacttgtctttggtgacagaggaactggaaaatcaaccgctgttagaggcttagcatccttgcttccaaaaattaaagttttgaagggatgcccgtataactgtaacgaattttcaaaaagttgtcctcattgtgggaacaaaaaaccgtcaaagtttattgaaaaagagacgccagttatagatttaccacttggttcttcagaagacagagtggtgggcgcactagatcttgaggcagctttagtagagggaaaaaaagtttttgaaccgggtttgctcgcaaaagcaaataaaggctttctttacatagatgaagttaatctgcttgaggatcacattgttgatctactactggatgcagcggcctctggagaaaaccttgttgaacgggaaggtctttcaataaaacatgaagcaaaatttgttcttgttggctctggaaatccggaagaaggtgagctcagaccacaattacttgatagatttggtctctctgtagaagtttcttcgccacaagacatatcagagagagtggaggtcataaagcgaagagacgcttatgaaactgattatgccaagttcataaaaaaatggcgtagagaagacagtaaaactagaaaaaagatactttagc

SEQ ID NO: 319961 - DNA, 937 bp, Unknown
  Bacterial polypeptide expressing nucleotide sequence isolated from the Sargasso Sea
tatgggacaggtcgtagggcgatccgcggagccgcaacaaggggcatgcatgagtatcgcttatccattcaccgctatcgtcggtcaggatgatatgaagcgcgcgttaacgatcgccgctgtcgacccgggcatcggcggggtgctcgtactcggtgagcggggcacaggtaaatccaccacgatccgggcgctcgccgccctactccctaaaatcgatgtggtgagcggttgctcatatcagtgcgaccccctgtcgccacgaccgggactctgtgcacagtgcggcaaaccctcggatacacccgacgccaaagccatgacaatccccgtggtcgacttaccattgggttcaacggaagatcgcgtagtcggtgcattggatatcgagcgtgctctggttaacggcgaaaaagcgtttcagccgggcctcttggcgcaggccaatcgcggctttctatatgtcgacgaagtgaacctgctggaggatcacattgtggacgcgttgctcgatgttgcggcctctggggagaacgtggttgagcgcgagggactgagcgttcgacacccggcacggttcgtgctggtaggcagcggcaaccctgaagagggggaacttcgtcctcagctgcaagatcgattcggtctctcggtcgacgtgcggacgcccggcgatgtaccgacccgcgtcgagatcatccgcctgcgagaagccttcgatcaggactgcgctacgttccgtaaaaaatgggcgcgcaaagagagtgcgctgcgccgaaagattcaatccgcccgggaacagctcgacaatgtggatacgcccgccgttctgctcgagaccgcagccaaactctgtttagcgctgggtacagatgggcttcgggggcgagctcaccctggtccgcagcgctcgggcactggcggcactggagggcaa

SEQ ID NO: 319962 - DNA, 510 bp, Unknown
  Bacterial polypeptide expressing nucleotide sequence isolated from the Sargasso Sea
aaggtgaattaaggccccaactattggacaggtttggaatgagtgttgaggttaagacagttagagatgctgaattaagagttcaagtagttgatcaaagaacttcttttgatgataatcctgatgaattttcattgagtgttgagaaacaacaagatgaacttcaacaaaaggttattaaagctcaagaaatattaaattctgttcagatggatgatgacttaagattgaatatatctgcaatctgcggagaactagatgtcgatggtttacgtggagatattgttacaaatcgatcggcaagggcaattgcagcatttgagggcagaactgaagtgcaagaagatgacatagcaagggttatttcttgttctttaagacatagactaagaaaagatcctttagaacaagttgattcaggtgaaagagttattcaagctttttgtaaagtatttgatttagatgaaaaagaaaatctttcaaaatttcaattgtctgcagaagcttaat

SEQ ID NO: 319963 - DNA, 811 bp, Unknown
  Bacterial polypeptide expressing nucleotide sequence isolated from the Sargasso Sea
aatgaataatgctttcccattcgcagcaatagtgggccaagaagatatgaagcttgcgatgattatgactgcaatagacccaaagattggtggtgtgctggtctttggagatcggggtactggaaaatctaccgctgtcaggggtttggccaatttattaccaccaataaaatcagttgaaggatgccccgtaaactcaggatcatcagatgaagtgccttcttggtcagaaaatacttcaaaaaaaactgtagaaataccaatgcccgttgtagatttacccttaggcataggctcagatcgcgttactggagcattagatatcgaaaaggcactcgttgatggagtaaaatcgttccaaccaggtcttttggcaaaagcaaaccgtggttatttatatattgatgaagttaatctgctagaagatcatatagttgatttattactcgacgtgtcgcaatcgggagaaaatgttattgagagggaaggtttatcaattcgtcacccctcagattttattttgataggttccggaaacccagaagaaggtgagcttcgcccccagttattagaccgatttggtttatcagttgaagtcataaccccacagactattcaagaacgaattgaggtaataaagcggcgtgatctctttgatcaagatcctgaaaatttccagaaaaattgggaaaaagaggacaaaaaaatttgcaaaaaaattatagccgctagaaaaagcattaataaaataaaaacttcagagagcattctggaactttgtgcggaaatttgtattgaaattggggagtga

SEQ ID NO: 319964 - DNA, 838 bp, Unknown
  Bacterial polypeptide expressing nucleotide sequence isolated from the Sargasso Sea
gcgatcaacccgagtattggaggggttctcattagagggaataaagggactgctaaatccaccgcggtaagatcgttggcattactgttacctgaactgaatctgattcaaggttgcgtctataattgcgatcatgactcgcctcaatccatatgtgaatattgtgataaagcggagcttaagaaaaatgttgcgagaccagtgcaaatagtacaactgcctgtaggggctacagaagatcgactagtgggatccttaaatatcgaagaagctatcaaaaccggaactcgtgaatttgaacctgggctattagccactgctaataaaggaatcctttatatagatgaggttaatctactcaacgatcatttagttgatgttctattggatgccgctgcaatggggcggaattacgttgaaagagaaggtgtatctgttagtcatgaagcccaattcatattgattggcactatgaatccagaagaaggagacttgaggccacagctccttgaccggtttgggctagctgtggaagttagtaatgagatcgaaaccgaagctcgcatagaagtggtaaaacgtcggatgagatttgaacaagacccagcaacatttgttgcttcttgggacgaaaaggaagaattggaaaggaaacggattgtacaaagccgtgaattgttaccagaaattaatgtttccgatgaaatgctgtatatgatatcggatatctgtgcgggttttggagtagatggtttaagaggtgatattgtgatgtacaaaaccgccatcacaattgctgcctacgaaggaagaactgaagtcaattcagatgatgtac

SEQ ID NO: 319965 - DNA, 858 bp, Unknown
  Bacterial polypeptide expressing nucleotide sequence isolated from the Sargasso Sea
gataatttatctactcaattaattttggcaaggctttggctaaaagatgtaaagataacaaaagagcaaataacttacttagttaatgaagctcttagaggtggagtagaagggcatagatcagagttatttgcagtaaaagtagcaaaggcgaatgcagctcttcgaggcgatgagaatgtcaattctgatgaccttaaagtcgcagtcagattagtcattctgccacgggcgatgcaaataccacctgaagaagatgatattcaaccaccaccaccagaagatcagagtccgccaccaccacctcaatcaaacaatgatgactctgagcctgacgctaatgaaaatgatgataatcaagagcaagaacaagaggaagataattctgatggagaagaagaatctactcccgaaatacctgaagaattcatattagatcctgaggcatgtatggttgaccctgatttattgcttttttcatcagctaaagctaaagctggaaatagcgggagtagatcaataatatttagtgacagtagaggaagatatgtaaaacctattattccaagaggtaaagtaaaaagaattgctgtagatgctactcttcgagctgctgctccttatcaaaaatcgagaagattaaggaatcctaataaatcaataattattgaagaaaatgatttcagggcaaaacttcttcaaaaaaaggcaggagctttagtcatttttctggttgatgctagtggctctatggctttaaatagaatgcaaagtgccaaaggcgctgtaataagacttttaacagaggcatatgagaatagagatgaagtagcccttattccttttagaggtaatcag

SEQ ID NO: 319966 - DNA, 959 bp, Unknown
  Bacterial polypeptide expressing nucleotide sequence isolated from the Sargasso Sea
gttggtgggtgcagtggatgtggccgcgtccctagccagcggcagcgcagtgttccagccgggtttgctggcagatgcccaccgcggcgtgctctacgtcgatgaactgaacctgctggacgacggcattgtcaatttgatgctggcggccgtgggcagcggcgaaaaccgagtggaacgggagggcctcagcctcagccatccctgcctgcccctgctgatcgccacgtacaacccggaggaaggcaacgttcgcgatcacctgctcgatcgcttcgctatcgcgctgtcggccaaccagctggtgagcaccgagcagcgggtggagatcaccggcgccgtgctcagccacggccaatgcagccgtagctttgcccaaaagtggggcgaggagaccgatgccctggccacccagctgctgctggctcgccagtggctgccggatgtgcagatcagtcgcgagcagatcgaatacctcgtcaccgaggcgatccgcggcggtgtggaagggcatcgctccgagctttacgcggttcgggttgcccgggcccatgccgccctctccggccgcgacaccgtggaggccgacgatctccaggtggccgtggctctggtgatcgcaccgcgggcctcccagatgccgccaccggaccagcaaatggaaccgccgccgccgcaggaccaggagccaccaccaccgccccaggaccagggcgatcaacagcaggacaatccgcccccaccactggaaggctccgatgaggaggacaacgatcctcctgaggacagcaacgacgacaacgacacggaagacgacgacggtgacggcgaagaggatcaggcccctccagccgttcccgaggagttcatgctcgacccggaggcgatcgaggtggatcccgatctgctgctgtttcatgccgccaaggccaagagcggggcacagcgcagccgatcgg

SEQ ID NO: 319967 - DNA, 544 bp, Unknown
  Bacterial polypeptide expressing nucleotide sequence isolated from the Sargasso Sea
gcagatttgttttattggctctggcaatccagaagaaggagaacttagacctcagttattagatagatttggtatgagcgttgaggttaagacagtaagagatgccgaattaagggttaaagtcgttgatcagcgaacttcatttgatgataatcccgatgaattctcaataagtgttgagaaacagcaggatgaccttcagcagaaagttattaaagcgcaagagatattaaattcagttcaattggatgatgatcttagattaaatatatctgctatatgtggcgaacttgatgttgatggactaaggggggatattgtaactaatcgatctgcaagggcaattgctgcatttgagggaagaactgaagtgcaagaagaagatatcgctagagtaattacatgttctttaaggcatcgattaagaaaagatcccttagagcaagttgattcaggagaaagagttattcaagcattctgtaaagtcttcgatttgaatgaaaaagaagacctttccaaatttcaattatcatcacaagaataa

SEQ ID NO: 319968 - DNA, 871 bp, Unknown
  Bacterial polypeptide expressing nucleotide sequence isolated from the Sargasso Sea
tgtgctgtccgcagatcaatctattgataatgctcaaagagttgagattacaaaatctgttttatcacacgcagaaaataatattaaattttcagaaaaatggtccgaagaatctgataatttatctactcaattaattttggcaagacaatggttaaaggatgtcaagataacaaaagagcaaataacctatttagtgaatgaagctcttaggggaggagtagaagggcataggtcagaactatttgcagtaaaagttgcaaaggctaatgcagctcttcgaggcgatgaaaatgtaaattctgaagacctaaaagtcgcagtaaggttagttattcttccacgagcaatgcaaatacctccagacgatgatgatattcaacccccccctccagaggatcagattcctccacctcctcctcaatcaaacaatgaagagtctgaacctgatactaatgaaaatgataatgagcaggaccaagaacgagaagaagaagataattctgatggagaagaagaatctactcctgaaatacctgaagaattcattttagatcctgaggcatgtatggtggatcctgatttattgcttttttcatcagctaaatcaaaagccggaaatagtggaagtagatctgtgatattcagtgatagtagaggaaggtatgtgaaacctataattccaagaggtaaagtaaaaagaattgcagtagatgcgactttgcgagctgcagctccttatcaaaaatcacgaagattaaggaatcctaataaatcaataatcatagaagaaaatgattttagggctaagcttcttcaaaaaaaggcgggtgctttagtcatttttcttgttgatgctagtggctctatg

SEQ ID NO: 319969 - DNA, 994 bp, Unknown
  Bacterial polypeptide expressing nucleotide sequence isolated from the Sargasso Sea
atggtggcaagcggtgttgcggtgaccgacgaccgggcgacccgagcctttcccctggccgccatcaccggccacggcaccctcaagctggcgctgttattggctgcggttgatccaggcctcggcggcgtggtgatcgccggcgggcgcggcaccggtaaatccgttctggcccgtggcctccacgcgctgttgccgcccatcgacatcctcgatgtcgacaacggcgtcggtcgcaacctcgatccgcagaaccctgaggagtgggatgccaccacccgggagcgcatcagcggtgagcctccctccagggtgatcccggcacccttcgtgcagatccccctggggatcaccgaagacaggttggtgggtgcggtggatgtggccgcgtccttggccagcggcagcgccgtgtttcagccgggtttgctggcggatgcccaccgcggcgtgctctacgtcgatgaactcaacctgctggacgacggcatcgtcaatttgatgctggcggccgtgggcagcggcgaaaaccgggtggaacgggaaggcctgagcctcagccacccctgccggcccctgctgatcgccacatacaaccccgaagaaggcaacattcgcgatcacctgctcgatcgcttcgccattgcgctgtcggccaaccaactggtgagcaccgagcagcgggtggagatcaccggcgccgtgctcagccacggccaatgcagccgcagctttgctcagaagtggggcgaggagaccgatgctttggccacccagctgctgctggctcgccagtggctgccggatgtgttgatcagtcgcgagcagatcgaatacctcgtcaccgaggcgatccgtggcggtgtggaagggcatcgttccgagctttacgcggttcgggtggcccgggcccatgccgccctctccggccgcgacaccgtggaggccgacgatctgcaggtggccgtggcgctggtgatcgcaccgcgggcct

SEQ ID NO: 319970 - DNA, 1064 bp, Unknown
  Bacterial polypeptide expressing nucleotide sequence isolated from the Sargasso Sea
catgaacgctgcgatccaacgacccatttttccatttgcggcgctgatcggccagacgccgttgcagcaggcgctgttgctggctgccgtcgatccgggtttgggcggcgtgctggtgagcggaccgcgcggcacggcgaaatcgaccgcggcgcgcgcgcttgccgaattgctgccggaagggcaatgggtgaatctgccgctcggcgcgagtgaagatcgcttgatcggtacgctcgatatcgaaaccgtactgcgcgatggttccgtgcgtttttctcccggcctgctggcgaaagcacatcgcggcgtgctgtatgtcgatgaagtgaatctgttgcccgacgcgctcgtcgatgcgttactcgatgctgccgccagtggcgtgaataccgtcgaacgcgatggtgtttcgcatagtcacgaggcgaacttcgtgctgatcggcacgatgaatccggaagaaggcgagttgcggccgcaactgatcgatcgtttcggtttgatggtcgagttgcagaactgttttgaaccgcaggtgcgtgagcagatcgttaaggcacggctggggttcgatctcgatccacagggttttcgtgctcgctatacgcagcaacaggaaacgtatgtccagcggattcgtgcggcgcgtgaagcgttgccgcgcctcaacttcgacgacgccgtgcatgcgcatgtcagtgcgctatgcattgaagcggcggtcgatggtttgcgtgccgatcttgtgatgctgcgcgcggcgcgggcgttggcggcgctggagcaggcggctgccgtcacgacagagcatgtcgggcgggttgcggaggcggtgctggcgcatcggcgccacgatcgcgaggtgcgtgcaggtggcgagacacttgagcgcgaagtgccgcagcaggctgctgacaatgcggatgccgcgccttcgcgatcctcgcaggaggcggtgccaggcgcggctgctgtcgataacgactggggctacttgccgccgcagcccgcgggtgtcgcgcaggtcaaaggcgttgtcccgctcgacgcaaaaaaacgct

SEQ ID NO: 319971 - DNA, 772 bp, Unknown
  Bacterial polypeptide expressing nucleotide sequence isolated from the Sargasso Sea
atggcaaccggtgtagcggtgaaggacgaccaggcgacacgagcctttccgttggccgccatcaccggtcatggaaccctcaagctcgccctgttgctggcggcggtggatcccggcctgggcggcgtggtcattgccggtgggcgcggcaccggcaaatcggttctggccagaggcctgcatgccctgctgccaccgatcgacatccttgatgccgagggcggcgtaggtcgaaacctcgacccgcagaacccggaggaatgggacgacgccactcgggagcggatcaccggcgaagccccctccaaagtgatccccgcccccttcgtgcagattcccctgggcatcaccgaagaccgcctggtgggtgccgttgatgtcgctgcatcgctctccagcggtagcgccgtgttccagccaggcctgctggcggaagcccatcgcggcgtgctttatgtcgacgagctcaatcttctggatgacggcatcgtcaacctgatgctcgcggccgtgggcagcggcgagaaccgggtggaacgcgaaggcctcagcctcaaccacccctgccggccgctgctgatcgccacttacaaccctgaggagggcaacgttcgcgatcaccttctggatcgctttgccatcgcactctcggcaaaccagctggtgagcactgagcagcgggtggaaatcaccaatgcggtgatcagccatggccaatgcagccgcagctttgccgaaaagtggggcgagcaaaccgacgccctggcaaccc

SEQ ID NO: 319972 - DNA, 892 bp, Unknown
  Bacterial polypeptide expressing nucleotide sequence isolated from the Sargasso Sea
gcaaggcaatggttaaaggatgtaaaaataacacaagagcaaatatcatatttagtaaatgaagctcttagagggggagtagaagggcatagatcagaattgtttgcagtaaaagttgctaaggcgaatgcagctcttcgaggagatgagaatgttaattctgaggatctaaaagtcgcagttagattagttattcttccacgcgcaatgcaaataccacctgaagatgaagatattcaaccaccgcctcctgaggatcagagcccgccaccaccacctcaatcaaacaatgatgactctgaacctgaggctaatgagaatgatgataatcaagagcaagaaaaagaagaagataattctgatggagaagaagaatctactcccgaaataccagaagaatttatattagatcctgaggcatgtattgttgatcctgatttattgcttttttcatccgctaaagcaaaagcgggaaatagtggaagcagatcagtaatatttagtgacagtagaggaagatatgtaaaacctattattccaagaggtaaggtaaaaagaattgctgtagatgcaactctccgagctgctgctccttatcaaaagtcaagaagattaaggaaccctaataaatcaatagttattgaagaaaatgattttagggcaaagcttcttcaaaaaaaggcgggtgctttagttatctttctagttgatgctagtggttctatggctcttaatagaatgcaaagtgcaaaaggagcagtaataagacttttaacagaggcatatgagaatagagatgaagtggctcttattccctttagaggtaatcaggccgaggtccttttgcctccaacaagatctataactgcagcaaaaagaaggctagaaacaa

SEQ ID NO: 319973 - DNA, 904 bp, Unknown
  Bacterial polypeptide expressing nucleotide sequence isolated from the Sargasso Sea
agaggaggagtagaagggcataggtcagaattatttgcagtaaaagtagcaaaggctaatgcagctcttcgaggcgatgagaatgtaaattctgaagacctaaaagttgcagttaggttagttattctcccacgagcaatgcaaattcctccggaagatgatgatattcaacccccccctccagaggatcaaagtcccccacctccacctcaatcaaacaatgaagagtctgaaccggaggctaatgaaaatgataatgagcaagaccaagaacaagaagaagataattctgatggagaagaggaatctactccagaaatacctgaagaattcatattagatcctgaggcatgtatggttgatcctgatttattgcttttttcatcagctaaagcaaaagccggaaatagtggaagtagatcagtgatattcagtgatagtagaggaaggtatgtgaaacctataattccaagaggcaaagtaaaaagaattgctgtagatgcgaccttgcgagctgcggctccttatcagaaatcaagaagattaaggaatcctgataagtcaatagtgattgaagaaaatgattttagagcaaagcttcttcaaaaaaaggcaggtgctttagttatttttttggtagatgcgagtggctctatggctctgaatagaatgcaaagtgctaaaggagcagtaattagacttttaacagaggcatatgagaatagagacgaagtagctctaatcccctttagaggtaatcaagccgaagttcttttacctccaacaagatctataactgcagcaaaaagaaggctagagactatgccttgcggtggaggatcgcctctcgctcatggactaacacaatcagcgaaggtagcaaaaaacgctctcgcaacaggtg

SEQ ID NO: 319974 - DNA, 889 bp, Unknown
  Bacterial polypeptide expressing nucleotide sequence isolated from the Sargasso Sea
caagaacaagaacaagagcaagaagaagataattctaatgtagaagaggaatcaactcccgaagtacctgaggaatttatattagatcctgaagcatgtatggttgatcctgatttactacttttttcatcagccaaagcaaaggctggtaatagtggaagtagatcaataatatttagtgacagtagaggaagatatgtaaaacctattattccaagaggtaaagtaaaaagaattgccgtagatgcaactcttcgagctgcagccccttaccaaaaatcaagaagattaaggaaccctaataaatcaataatcattgaagaaagtgattttagggcaaagcttcttcagaaaaaggcgggcgctttagttatttttctggttgatgcgagtggatctatggctcttaacagaatgcaaagtgctaaaggtgcggtaataaggcttttaacagaggcttatgagaacagagatgaggttgccttgatcccctttagagggaatcaggctgaggttcttttacctccaacaagatctataactgcagcaaaaagaaggttagaaacaatgccttgcggtggtggatcgcccctagctcatggactaacacaatcagcgaaagtagcgaaaaatgctctttcaacaggagacatagggcaagttatagttgtgggcattactgatggaagaggaaatgtacctttaggattatctctaggacaaaatgaggttgaagaaaaagataatgcaaatgaaaatgtcaacttaaagcaagaagttcttgatattgcggccaaatatcccatgcttggtataaagcttttgataattgatacagagagaaagtttattgcaagcggcttcggtaaagaattagcagaggcggcta

SEQ ID NO: 319975 - DNA, 897 bp, Unknown
  Bacterial polypeptide expressing nucleotide sequence isolated from the Sargasso Sea
tctgggtggtgtggtgatcgcgggcggacgcggcacgggcaaatcagtgctcgcccgaggcctgcacgccttgctgccagccatcgaaattcttgaaggcagctggaatgaagagcctgatggggaaaatcccagcaaggtgatccccgcaccctttgtacagatccctcttggggtcaccgaagaccggctggtcggctcggtggatgccacccgctcgctctctgaagggcgaaccgtgtttcaacccgggcttctagctgaagcccacagaggggtgctctacatcgatgagctcaacctgctggatgccaatgccttgaacctggtgctggccgctgtgggctcgggcaccaaccaggtggagcgcgaagggctgagtgtggcccatccctgccggccgctactgattgctacctacaacccggaagagggggctgttcgagaccacctgctcgatcgctttgccattgccctctcctctgatcaaaccatcgacagtgcttcccgcgtcagcattgccgaagctgccatcgcctacggcgaaaacgctgtggcatttcaggctcaattccaagaggaaactgatgctctcgccacacagctactgctagcgcggcaatggcttcccgatgtacaaatcaaccgcgaacagattgcttatctagtgaatgaggcattgcgcggcggtgtggaaggccaccgggctgagctctatgcgctgcgcgtggcccgagcccatgccgccttgcaaggccgcgatcaagtggaagccgaagacctgcaactggcggttcgtttggtgatcgcaccgagggccaagttgatgcccccgcctgatgatcagcaacaaccccctcctccaccgccacccagcaacaacgaggaccaagccga

SEQ ID NO: 319976 - DNA, 960 bp, Unknown
  Bacterial polypeptide expressing nucleotide sequence isolated from the Sargasso Sea
gtcgcagtaagattagttattcttccacgagcaatgcaaatgccacctaaagatgatgatattcagccaccgcctccagaggatcagagcccgccacccccgccgcaatcaaataatgatgactctgaacctgaggctaatgaaaacgatgataatcaagagcaagagcaagaagaagataattctgatggagaagaagaatctactcctgaaatacctgaagaatttatattagatcctgaggcctgtatggttgatcctgatttattgcttttttcatcagcaaaagcaaaagcgggaaatagtggaagtagatcagtgatatttagtgacagtagaggaaggtatgtaaaacctattattcccagagggaaagtaaaaagaattgcggtagatgcaactcttagagctgctgctccttatcaaaaatcaagaagattaaggaaccctaataaatcaatagttattgaagaaaatgattttagggcaaagcttcttcaaaaaaaggcgggtgctttagttatttttcttgttgatgcgagtggctcaatggctcttaatagaatgcaaagtgctaaaggtgcagttataagacttttaacagaggcatatgagaatagagatgaagtggctctaattccctttagaggtaatcaggccgaagttcttttacccccaacaagatctataactgcggcaaaaagaaggctagaaacaatgccttgcggaggtggatcgcctttagctcatggactgacgcaatcggcgaaagtagcaaaaaatgctctttctacaggagatataggtcaagttattgtcgtggggattactgatgggagaggaaatgtaccattaggattatctctaggaaaaaatgagtttgaagaaaaagatagtgaaaataataatgtccatttaaagcaagaagttcttgatatagctgcaaaatttcccatgctc

SEQ ID NO: 319977 - DNA, 898 bp, Unknown
  Bacterial polypeptide expressing nucleotide sequence isolated from the Sargasso Sea
gtctgaggaatctgataatttatctactcaattaattttggcaaggcaatggttaaaggaagtgaagataacaaaagagcaaataacctatttagttaatgaagctctaagaggaggagtagaaggtcacagatcagaattatttgctgtgaaagtggctaaggcaaatgcggctcttagaggcgatgagaatgtaaattctgaagacttaaaggttgcagtaaggttagttattctcccacgggcaatgcaaataccacctaatgatgacgatatccaaccaccgcctccagaggatcagagtccgccacctccacctcaatcaaacaatgatgattctgagcctgattccaatgacattgatgataatcaagaacaagaacaagaagaagataattctgatggagaagaagaatctactcccgatattcctgaagaatttatattagatcctgaggcatgtatggttgatcctgatctattacttttttcatcagctaaagcaaaagcgggtaatagtggcagcagatctgtgatatttagtgacagtagaggaagatatgtaaaacctattattccaagaggtaaagtaaaaagaatagccgtagacgcaactctgcgagctgctgctccgtatcaaaaatcaagaagattaaggaaccctgataaatcaatagttattgaagaaaatgattttagggctaagcttctgcaaaaaaaggcgggtgctctagttatttttctggttgatgcgagtggttctatggctctaaatagaatgcaaagtgctaaaggtgcagtaataagacttttaacagaggcatatgagaatagagatgaagtggctcttatcccttttagaggtaatcaggccgaagttcttctgccccctacaaga

SEQ ID NO: 319978 - DNA, 625 bp, Unknown
  Bacterial polypeptide expressing nucleotide sequence isolated from the Sargasso Sea
ttcttcaaaaaggcgggtgctttagtaatttttcttgttgatgctagtggctctatggctttaaatagaatgcaaagtgctaaaggtgcggtaataagacttctaacagaggcatatgaaaatagagatgaagtagctcttattccttttagaggtaaccaggccgaagttcttttgcctccaacaagatcaataactgctgcaaaaaggaggcttgaaacaatgccttgtggtggaggatcccctttggcacatggactaacacaatcagcaaaagtagcaaaaaatgctctttcaacaggagatataggtcaagttattgttgtggggatcactgatggccgaggaaatgtaccattaggattatccctaggaaaaaatgaggttgagggaaaagataacgaaaatgaaaatgtcaatttaaagcaagaggttcttgatatcgctgcaaaatatcccatgcttgggataaaactcttagtaattgatacagagagaaaatttattgcaagcggctttggtaaagaattagcagaggctgctaaaggtaaatatgttcaactgccaaaagccaccgataaagcaatcgcagctatgactttaaatgctataaatgaattctaaa

SEQ ID NO: 319979 - DNA, 693 bp, Unknown
  Bacterial polypeptide expressing nucleotide sequence isolated from the Sargasso Sea
gttcgtttggtgatcgcaccgagggccaagttgatgcccccgcctgatgatcagcaacaaccgccgcctcccccaccccctccaccgggcgacaacgaggaccaagccgatcctccagaaaatgagaacaacaacgaagacgacgagcccgatccacccgaacccgatgagccggaagacgacacacccccgagcgtgcctgaggagttcatgctcgatgcggaagccaccgcgatcgaccctgaactaatgcaattccaaagcgccaaaaaccgtgcagccagcagtggctcgcgcggcattgtgctgagtgaaagccgcggccgctatgtgcgacctgtgctgccccgcggaccgattcgacgtattgctgttgacgccacgctccgcgcagcggccccgtatcaaaaagctcgccgcgctcgcgaaccccaccgcaaggtgattgtccaagacggagacctacgggccaagcaactgcaacgcaaagcgggcgcgctggtgattttcctggtggatgccagcggctcgatggcgctgaaccgcatgcaaagtgccaagggagctgtgctgaggctgctgactgaggcctatgaaaaccgtgatgaggtggcgctgatccccttccgcggcgagcaagctgaagtgctgctgcccccgaccagatccatcacagctgccaagcggcgattg

SEQ ID NO: 319980 - DNA, 982 bp, Unknown
  Bacterial polypeptide expressing nucleotide sequence isolated from the Sargasso Sea
atcacgtatctggtcacagaagccctgcgcggcggtgtggaggggcatcgagccgagctttatgccgtacgggtcgcaaaagctcacgccgccctgcagggacgcgatcaagtggaagccgaagacctgcagctggctgtccgtctggtgatcgcaccgcgggccaaactgcagccaccaccagacgatcagcaacaacagccgccaccaccgccaccccctggggataacgaggaagagccggatccaccagacagtgaagaagagaactcagaagaggacgaaccagacgagcccgacgaccccgaaaccgattcgccaccaagcgtgccggaggaattcatgctcgatgcagaagccaccgccattgatccggagctgctgcagtttcaaagcgctaaatcgcgagcggccagtagtggttcgcgcggcgtggttctcagcgacagccgaggccgttatgtgcgtccgatcattccccgcggtcccgttcgccgcatcgcagtggatgcaaccttgcgcgctgcagcgccataccagcgggcccgccgtgagcgggaaccgcaccgcaaagtgatcgtgcaggacggggacctgcgggctaagcaactgcagcggaaggctggtgctcttgtgatcttcctggttgatgccagcggctcaatggccctcaaccggatgcagagcgccaaaggcgccgtactcaggttgctcaccgaggcttacgagaaccgcgacgaagtgtccctgatccccttccgtggtgagcaggctgaggtgctattaccacccacacgctccatcactgctgccaagcgtcgactggagaccatggcctgcggcggtggcagtcctctagctcatggattggcgcaggctgcacgggttggcgccaatgctctgcagactggcgaactttcacaggtagtcgttgtggcgatcaccgatggcagaggcaacgtgcccctggggcgctcgctcg

SEQ ID NO: 319981 - DNA, 727 bp, Unknown
  Bacterial polypeptide expressing nucleotide sequence isolated from the Sargasso Sea
agatgctacccttcgagctgctgctccttatcaaaaatcgagaagattaaggaatcctaataaatcaatagttatagaagaaaatgattttagggcaaagcttcttcaaaaaaaggcgggtgctttagttatttttctcgttgatgctagtggttctatggctcttaatagaatgcaaagtgctaaaggtgcagttatcagacttttgactgaggcatatgaaaatagagatgaaatagctcttattccctttataggtaaccaagcagaagttcttttgcctccaacaagatctataactgctgcgaaaagaaggctagaaacgatgccatgtggaggtggatcgcctttggctcatggactaacacaatcagcaaaagtagcaaaaaatgctcttgcaacaggagatatagggcaagtgattgttgttgggattaccgatggccgaggaaatgttccattaggagtatctctaggacaaaatgaagttgagggaaaagataatgaaaatgaaaatgtcaatttaaaacaggaggttctagatatcgctgcaaaatatcccatgcttggtataaaactcttagtaattgacacagagagaaaatttatagcaagtggatttggtaaagaattagcagaggcagctcaagggaaatatgtccaactgccaaaagccacagataaagcaatcgcagctatggctttaaatgctataaatgaattctaa

SEQ ID NO: 319982 - DNA, 599 bp, Unknown
  Bacterial polypeptide expressing nucleotide sequence isolated from the Sargasso Sea
tatttttcttgttgatgctagtggttctatggctcttaatagaatgcaaagtgctaaaggtgcagttatcagacttttgactgaggcatatgagaatagagatgaagtagctcttattccctttagaggtaatcaggccgaagtgcttttgcctccaacaagatctataacagctgcgaaaagaaggctagaaacgatgccatgtggaggtggatcccctttggctcatggactaacacaatcagcaaaagtagcaaaaaatgcgctttctactggagatataggtcaagtgattgttgttgggattaccgatggcagaggaaatgttccattaggagtatctctaggacaaaatgacgttgagggaaaagataatgaaaatgaaaatgtcaatttaaaacaggaggttctagatatcgcggcaaaatatcccatgcttggtataaaactcttagtaattgatacagagagaaaatttatagcaagcggatttggtaaagaattagcagaggcagctcaagggaaatatgtccaactgccaaaagccacagataaagcaatcgcagctatggctttaaatgctataaatgaattctaaa

SEQ ID NO: 319983 - DNA, 801 bp, Unknown
  Bacterial polypeptide expressing nucleotide sequence isolated from the Sargasso Sea
atcagtcatatttagtgacagtagagggaagatatgtaaaacctattattccaagaggtaaagtaaaaagaattgctgtagacgctacctttcgagctgctgctccttatcaaaaatccagaagattaaggaatcctaataaatcaataatcatagaagaaaatgattttagggctaagcttcttcaaaaaaaggcaggtgctttagtcatttttcttgttgatgctagtgggtctatggctcttaatagaatgcaaagtgctaaaggtgcagttattagacttttgaccgaggcatatgagaacagagatgaagttgccctaattccctttagaggtaatcaggcagaagttcttttgcctccaactagatcaataactgcagcgaaaagaagattagaaacaatgccttgcggaggtggatcgcctttggctcatggactaacgcaatcagcaaaagtcgcaaaaaatgctctttcaactggagatataggtcaagttattgttgttggaattactgatggaagaggaaatgttccattaggattatctttaggacaaaatgaggttgagggaaaagataatgaaaatgtcaatttaaaacaggaggttctagatatcgctgcaaaatatcccatgctcgggataaaactcttagtaattgatacagagagaaaatttatagcaagtggatttggtaaagagttagcagaggctgctcaagggaaatacgttcaattgccaaaagctacagataaagcaatcgcggctatggctttaaatgctatcaatgaattctaaa

SEQ ID NO: 319984 - DNA, 737 bp, Unknown
  Bacterial polypeptide expressing nucleotide sequence isolated from the Sargasso Sea
gatgctgccccgagggccggtgcgccgcatcgccgtggacgccaccctgcgggcagcagcgccgtaccagaagattcgccgcgaacgggaaccgggccgctccgtgatcgtggaagagggcgatctgcgggccaagttgctacaacgcaaggccggcgctctggtggtgttcctcgtggatgccagcggctccatggcactgaaccggatgcaaagcgccaagggcgctgtgatccggctgctgactgaggcctacgaaaaccgcgatgaggtagccctgatccccttccgcggcgatcaggccgaagtcctgctccctcccacccgctcgatcacggcggctcgccgccgcctggaatcgatgccgtgcggcggcggttcacccctggcccatggcctcacgcaagcggcccgcgttggcgccaatgcgctggccacgggagatctcggccaggtggtggtggtggcgatcaccgacggacgcggcaacgtgcccctgagcacctctctcggtcaacccgaactggacggcgaagagaaacccgatctcaaacaggaagtgctggacgtcgccgcccgctaccggatgctcgggatcaagctgctggtgatcgacaccgaacgcaagttcatcggcagtggcatgggcaaggacctcgccgaggccgctggtggcaaatacgtgcagttacctaaggccagcgatcaggcgattgcggcggtggcgatggacgcga

SEQ ID NO: 319985 - DNA, 492 bp, Unknown
  Bacterial polypeptide expressing nucleotide sequence isolated from the Sargasso Sea
tctactcccgaaatacctgaagaattcatattagatccagaggcatgtatggttgatcctgatttattgcttttttcatcagctaaagctaaagcaggaaatagcgggagtagatcagtcatatttagtgacagtagaggaagatatgtaaaacctattattccaagaggtaaagtaaaaagaattgctgtagacgctacccttcgagctgctgctccttatcaaaaatcaagaagattaaggaatcctaataaatcaataatcatagaagaaaatgattttagggctaagcttcttcaaaaaaaggcaggtgctttagtcatttttcttgttgatgctagtgggtctatggctcttaatagaatgcaaagtgctaaaggtgcagttattagacttttgaccgaggcatatgaaaacagagatgaagttgccctaattccctttagaggtaatcaggcagaagttcttttgcctccaactagatcaataact

SEQ ID NO: 319986 - DNA, 857 bp, Unknown
  Bacterial polypeptide expressing nucleotide sequence isolated from the Sargasso Sea
actcctgcaataccttgaagaattcattttagatcctgaggcatgtatggttgatcctgatttgttacttttttcatcagccaaagcaaaagcaggaaatagtggaagtagatcagtgatattcagtgatagtagaggaagatatgtgaaacctataattccaagaggtaaagtaaaaagaattgcggtagatgctactttgcgagctgcagctccttatcaaaagtcacgaagattaaggaatcctaataaatcaataattattgaagagaatgattttagggcaaagcttctccaaaaaaaggcgggtgctttagtcatttttcttgttgatgctagtggttctatggctcttaatagaatgcaaagtgctaaaggtgcagttatcagacttttgaccgaggcatatgagaatagagatgaagtcgccctaattccctttagaggtaatcaggcagaagtgcttttgcctccaacaagatcaataactgcagcgaaaagaaggttagaaacaatgccttgcggaggtggatcgcctttagctcatggactaacgcaatcagcaaaagtagcaaaaaatgctctttcaacaggagatataggtcaagttattgttgtcggaattaccgatggaagaggaaatgttccattaggattatctctaggacaaaatgaggttgagggaaaagataatgaaaatgaaaatgtcaatttaaaacaggaggttctagatatcgctgcaaaatatcccatgctcgggataaaacttttagtaattgatacagagagaaaatttatagcaagtggatttggtaaagaattagcagaggctgctcaagggaaatacgtcccattgc

SEQ ID NO: 319987 - DNA, 1248 bp, Unknown
  Bacterial polypeptide expressing nucleotide sequence isolated from the Sargasso Sea
gggggacaagtttttcacctggaattttggcagaggctcacaggggagttctttatgtagacgatataaatttattggatgatggcattgtaaatttaattctcgaagctacaggaagagagaaaaataatattgaaagagatggtttaagcctctctcatccttgtaagtcacttttaatagcaacttataatcctgaagaaggtgctttaagagatcatgttttagatcgttttgctattgttctttccgcagatcaatctattgataatgctcaaagagttgagattacgaaatctgtattatcacacgcagaaaataatattaaattttcagaaaaatggtcggaagaatctgataatttatctactcaattaattttggcaaggcaatggttaaaggatgtcaagataacaaaagagcaaataacctatttagtgaatgaagctcttagagggggagtagaagggcatagatcagaattgtttgcagtaaaagtagcaaaggcgaatgcagctcttcgaggagatgagcatgtaaattctgaagacctaaaagtcgcagtaaggttagttattcttccacgagcaatgcaattacctccagaagatgatgatatacaaccaccccctccagaggatcagagtcccccgcctccacctcaatcaaacaatcaagagtctgaacctgagtctaatgaaaatgatgatgatcaagagcaagaacaagaggatgataattctgatggagaagaagaatctactcccgatatacctgaagaattcatattagatcccgaggcatgtatggttgatcctgatttattgcttttttcatcagctaaagcgaaagcaggaaatagtggaagtagatcagtcatatttagtgaaagtagaggaagatatgtaaaacctattcttccaagaggcaaagtaaaaagaattgcagtagatgcaactctgcgagcggctgctccttatcaaaaatcaagaagattaaggaaccctgacaaatcaataattattgaagaaaatgattttagggcaaagcttcttcaaaaaaaggcgggtgctttagttatttttctagttgatgctagtggttctatggctcttaatagaatgcaaagtgcaaaaggagcagtaataagacttttaacagaggcatatgagaatagagacgaagtggctcttattctctttagaggtaatcaggccgaggtccttttgcctcaacaagatctataac

SEQ ID NO: 319988 - DNA, 1152 bp, Unknown
  Bacterial polypeptide expressing nucleotide sequence isolated from the Sargasso Sea
acttataatcctgaagaaggtgctttaagagatcatgttttagatcgttttgctattgttctttccgcagatcaatctattgataatgctcaaagagttgagattacaaaatctgttttatcacacgcagaaaataatattaaattttcagaaaaatggtctgaagaatctgataatttatccactcaattaattttggcaaggcaatggttaaaggatgtcaagataacaaaagagcaaataacctatttagtgaatgaagctcttagaggaggagtagagggacataggtcagaattatttgcagtaaaagtagcaaaggctaatgcagctcttcgaggagatgagaatgtaaattctgaagacctaaaagtcgcggtaaggttagttattctcccacgagcaatgcaaattcctccagaagatgaagatatccaacccccccctccagaggatcagagtcctccacctcctcctcaatcaaacaatgaagagtctgaacctgaggctaatgaaaatgataatgagcaagaccaagaacaagaagaagataattctgatggagaagaagaatctactcccgaaatacctgaagaattcatattagaccctgaggcatgtatggttgatcctgatttattgcttttttcatcagctaaagcaaaagccggtaatagtggaagtagatcagtgatattgagtgatagtagaggaaggtatgtgaaacctataattccaagaggtaaagtaaaaagaatagcggtagatgcgactttgcgagctgcagctccttatcaaaaatcaagaagattaaggaaccctaataaatcaatagttattgaagaaaatgattttagggctaagcttcttcaaaaaaaggcgggtgctttagtcattttccttgttgatgctagtggttctatggcccttaatagaatgcaaagtgctaaaggtgcagttatcagacttttgaccgaggcatatgagaatagagatgaagttgccctaattccctttagaggtaatcaggcagaagtgcttttgcctccaacaagatcaataactgcagcgaaaagaaggctagaaacaatgccctgtggaggtggatcgcctttagctcatggactgacgcaatcagcaaaagtagcaaaa

SEQ ID NO: 319989 - DNA, 1444 bp, Unknown
  Bacterial polypeptide expressing nucleotide sequence isolated from the Sargasso Sea
agatcgttttgccatcgtgctttccgcagatcattctattgataatgctcaaagagttgagattacaaaatctgttttatcgcatgcagaaaataatattaaattttcagaaaaatggtctgaagaatctgataatttatccactcaattaattttggcaaggcaatggttaaaggatgtcaagataacaaaagaacaaataacctatttagttaatgaagctcttagaggaggagtagaaggtcataggtcagaattatttgcagtaaaagtagccaaggctaatgcagctctccgaggcgatgagaatgtaaattctgaagacctaaaagttgcagttaggttagttattctcccacgagcaatgcaaattcctccagaagatgatgatattcaaccccctcctccagaggatcagagtcccccacctccacctcaatcaaacaatgaagagtctgaacctgaggctaatgaaaatgataatgagcaagaccaagagcaagaagaagataattctgatggagaagaagaatctactcccgaaatacctgaagaattcattttagatcctgaggcatgtatggttgatcctgatttgttacttttttcatcagccaaagcaaaagcaggaaatagtggaagtagatcagtaatattcagtgatagtagaggaaggtatgtgaaacctataattcctagaggtaaagtaaaaagaattgcggtagatgcgactttgcgagctgcagctccttatcaaaaatcacgaagattaaggaatcctaataaatcaatagttattgaagagaatgattttagggcaaagcttctccaaaaaaaggcgggtgctttagtcatttttcttgttgatgctagtggttctatggctcttaatagaatgcaaagtgctaaaggtgcagttatcagacttttgaccgaggcatatgagaatagagatgaagttgctctaattccctttagaggcaatcaggcagaagttcttttgcctccaacaagatcaataactgcagcaaaaagaaggctagaaacaatgccttgtggaggtggatcgcctttagctcatggactaacgcaatcagcaaaagtagcaaaaaatgctctttctactggagatataggtcaagttattgttgttggaattaccgatggaagaggaaatgttccattaggattatctttaggacaaaatgaggttgagggaaaagataatgaaaacctcaatttaaaacaagaggttttagatatcgccgcaaaatatcccatgctcgggataaaacttttagtaattgatacagagagaaaatttatagcaagtggatttggtaaagagttagcagaggctgctcaagggaaatacgtccaattgccaaaagctacagataaagcaatcgcagctatggctttaaatgctatcaatgaattctaa

SEQ ID NO: 319990 - DNA, 1480 bp, Unknown
  Bacterial polypeptide expressing nucleotide sequence isolated from the Sargasso Sea
accccgaggagggcaatgtgcgcgatccctgctggatcgctttgccatcgctctttcggccaatcaactggtcacgaccgaacagcgcgtggagatcaccaatgcggtgttgaaccatggccagtgcagccgctccttcgcgcagacctgggcggaggagacagacgccctggccacccagctgctgctcgcgcgccaatggctgccggatgtccagatcagccgcgagcagatccaatacctggtgaatgaggccatccgtggcggtgtggaaggtcaccgttcggagctctacgccgtacgggtcgctcgcgcccatgccgctctgagcggccgcgatcgagtcgaagccgacgacctccaggttgcggtggcgctggtgattgctccgcgcgcttcccagctgccgccaccggatcagcagatggagccacccccgccgcaggagcaggagccgccgccgccaccagaaggagaaacgccgcctgatgaggagcaggagcccccggaggacagcaacgaggacgacgacgaacccgacaacgaagacgaggacgacactccagaggatcaggcacccccttcaatcccggaggaattcatgctcgacccggaggcggtggccatcgatcccgatctgctgctgttcaatgccgcgaagagcaagagcggcagcagcggcagccgttcgatggtgatgagtgacagccgcggtcggtacgtgaaaccgatgttgccccgcgggcccgtccggcgcattgccgtggacgcaacgctacgagccgccgccccgtatcagaaggtgcgccgcgaacggcaaccgaaacgaaccgtgatcgttgaggaaggcgacctgcgcgccaagttgctgcagcgcaaggccggggctctggtggtgtttctggtggatgccagcggatcgatggccctgaaccgcatgcagagcgccaaaggtgctgtgatccgtcttctcactgaggcctacgaaaaccgcgacgaggtggccctgatcccattccgtggcgatcaggccgaggtgctgctgccacccacacgctccatcaccgccgcccgccgacgcctggaatcaatgccctgtggtggcggctcaccgctggcccatggcctgacccaggcggcccgcgtcggcgccaatgcgctggccaccggcgatctcagccaggtggttgtcgtggcgatcaccgatgggcgcggcaatgttccactgagcacctccctggggcaaccggagctggagggcgaggacaaacccgacctcaaacaggaggttctggatgtggcagcgcgctaccgcatgctcggcatcaaattgctggtgatcgacacggagcggaaattcatcggcagtggcatgggcaaagacctggccgaagccgcgggagggaaatatgtccaactgcccaaagccagcgatcaggccattgcagcggtggcgatggatgccatcagcacgatatag

SEQ ID NO: 319991 - DNA, 1291 bp, Unknown
  Bacterial polypeptide expressing nucleotide sequence isolated from the Sargasso Sea
tttggcaaggcaatggttaaaggatgtcaagataacaaaagagcaaataacctatttagtgaacgaagctcttagaggaggagtagaagggcataggtcagaattatttgcagtgaaagtagcaaaggctaatgcagctcttagaggcgatgataatgtaaattctgaagacctaaaagtagcagtaaggttagtcattcttccacgagcaatgcaaatacctccagaagatgatgatattcaaccaccacctccagaggatcagagtccaccacccccacctcaatcaaacaatgaagagtctgaacctgaaactagtgaaaatgataatgagcaagaccaagaacaagaagaagataattctgatggagaagaagaatctactcccgaaatacctgaagaattcatactagatcctgaggcatgtaatgttgatcctgatttattgcttttttcatcagctaaggcaaaagcagggaatagtggtagtagatcagtcatatttagtgacagtagaggaagatatgtaaaacccataattccaagaggtaaagtcaaaagaattgctgtagatgcaacattacgagctgccgctccttatcaaaaatcaagaagattaaggaatcccaataaatccataattattgaagaaaatgattttagggcaaagcttcttcaaaaaaaggcgggagctttagtaattttcctagttgatgctagtggctcaatggctttaaatagaatgcaaagtgccaaaggtgctgtcataagacttttaacagaggcatatgagaatagagatgaagtagctcttattccttttagaggtaatcaggccgaagtgcttttgccaccaacaagatcaataactgctgcaaaaagaagattggaaacaatgccttgtggtggagggtcccctttggcacatggactaacgcaatcagcaaaagtagcaaaaaatgctctttctactggagatattggtcaagttattgttgttggaattaccgatggaagaggaaatgttccattaggattatccttaggacaaaatgaggttgagggaaaagataatgaaaatctcaatttaaaacaggaggttttagatatcgctgcaaaatatcccatgctcgggataaaactattagtaattgacacagagagaaaatttatagcaagtggatttggtaaagagttagcagaggctgctcaagggaaatacgtccaattgccgaaagctacagataaagcaatcgcagctatggctttaaatgctatcaatgaattctaa

SEQ ID NO: 319992 - DNA, 1064 bp, Unknown
  Bacterial polypeptide expressing nucleotide sequence isolated from the Sargasso Sea
gccgcaggaccaggagccgccgccaccgccccaggaccagggcgaccagcagcaggagaatccaccgccgccaccggaaggatccggtgaggaggaggacaacgatccgccggaggacaacaccgacgacgatgacggcgacggcgaggaggaccaggcccctccagctgtgcccgaggagttcatgctcgatcccgaagcgatcgaagtggactctgatctgctgctgttcaacgccgccaaggccaagagcggcaacagcggcagccgttcagtggtgctcagcgacagccgcgggcgttatgtgaaaccgatgctgccccgcggtccggtgcgtcgcatcgccgtggatgccaccctgcgtgcggccgcgccgtaccagaagatccggcgagagcgggaaccgggtcgctcggtgatcgtggaggagggcgacctgcgggccaagttgctgcagcgcaaggccggcgccctggtggtgttcctcgtggatgccagcggctcgatggccctcaaccggatgcagagcgccaagggcgccgtgatccgactgctcaccgaggcctacgaaaaccgcgacgaagtcgccctgatccccttccgcggcgatcaggccgaggtgctgctgcctccaacccgctcgatcacagcggcccggcgccggctggaatcgatgccctgcggtggtggttcaccgctggcccacggcctcacccaggccgcccgcgtcggtgccaatgcgctggccaccggcgatctcggccaggtggtggtggtggccatcaccgacggtcgcggcaacgtgcccctgagcacatccttgggccaaccggaactggaaggcgaggagaaacccgacctcaagcaggaggtgctggacgtcgccgcccgctaccggatgctcgggatcaagctgctggtgatcgacaccgagcgcaagttcatcggcagcggcatgggcaaggacctcgccgaagccgccggtggcaaatatgtgcagctgcccaaggccagcgatcaggcgatcgccgctgtggcaatgaatgccatcaacgaaatctaac

SEQ ID NO: 319993 - DNA, 1525 bp, Unknown
  Bacterial polypeptide expressing nucleotide sequence isolated from the Sargasso Sea
gaacaagtttttcaacctggaattttagcagaggctcatagaggtgttctttatgtagatgatataaatttactggatgatggcattgtaaatttaattcttgaagcgacaggaagagagaaaaataatattgagagagatggtttaagcctttctcatccttgtaagtcacttttaattgcaacgtataatcctgaagaaggtactttaagagatcatgttttagatcgttttgctattgttctttccgcagatcaatctattgataatgctcaaagagttgagattacaaaatctgttttatcacacgcagaaaataatattaaattttcagaaaaatggtcggaagaatctgataatttatctactcaattaattttggcaaggcaatggttaaaggatgtcaagataacaaaagagcaaataacctatttagtgaatgaagctcttagaggtggagtagaaggacataggtcagaattatttgcagtaaaagtagcaaaggctaatgcagcacttcgaggcgatgagaatgtaaattctgaagatctaaaagtcgcagtaaggttagttattcttccacgagcaatgcaaatacctccagaagatgatgatattcaaccacctcctccagaggatcagagtcccccacccccacctcaatcaaacaatgaagattctgaacctgagactagtgaaaatgataatgagcaagatcaagaacaagaagaagataattctgatggagaagatgaatctactcccgaaatacctgaagaattcatattagatcccgaggcatgtatggttgatcctgatttattgcttttttcatcagctaaagctaaagcagggaatagcgggagtagatcagtcatatttagtgacagtagaggaagatatgtaaaacctattattccaagaggtaaagtaaaaagaattgctgtagacgctacccttcgagctgctgctccttatcaaaaatcaagaagattaaggaatcctaataaatcaataatcatagaagaaaatgattttagggctaagcttcttcaaaaaaaggcaggtgctttagtcatttttcttgttgatgctagtgggtctatggctcttaatagaatgcaaagtgctaaaggtgcagttattagacttttgaccgaggcatatgagaacagagatgaagttgccctaattccctttagaggtaatcaggcagaagttcttttgcctccaactagatcaataactgcagcgaaaagaagattagaaacaatgccttgcggaggtggatcgcctttggctcatggactaacgcaatcagcaaaagtcgcaaaaaatgctctttcaactggagatataggtcaagttattgttgttggaattaccgatggaagaggaaatgttccattaggattatctttaggacaaaatgaggttgagggaaaagataatgaaaatgaaaatgtcaatttaaaacaggaggttctagatatcgctgcaaaatatcccatgctcgggataaaac

SEQ ID NO: 319994 - DNA, 1904 bp, Unknown
  Bacterial polypeptide expressing nucleotide sequence isolated from the Sargasso Sea
tttgaaccccgagttaaaagaaaaaggtgaaataaaagatttaatgaagtcgaaggattcttttagagctttccctttggccgcaattaccggtcatagcttattgaaattatctttacttttagcagcagttgatcctagtttagggggagtgattattgctggcgggagaggtactggcaagtcagtattagcaaggggtttacatactttacttcctccaatagaagtattagataatgaattaatattggaaaagctaactgagaaaaatagtggaacttcattaagacctattggtaggaacctagatccagataaaccagaggaatgggatattagtactaataaattgttggaggaggtaattggaagtgattatttgaatcaaattgaagaaattccgaaaaaagtaagagaggctccatttattcaagttcccattggcataactgaagataggcttgttggatcaattgacgttgctgcatcattaagtacgggggaacaagtttttcaacccggaattttagcagaggctcatagaggtgttctttatgtagacgatataaatttattggatgatggcattgtaaatttaattcttgaagcaacgggaagagagaaaaataatattgaaagagatggtttaagcctttctcatccttgtaagtcacttttaatagcaacttataatcctgaagaaggtgctctaagagatcatgttttagatcgttttgccattgtgctttccgcagatcaatctattgataatgcacaaagagttgagataacaaaatctgttttatcacacgcagaaaataatattaaattttcagaaaaatggtctgaagaatctgataatttatccactcaattaattttggcaaggcaatggttaaaggatgtcaagataacaaaagaacaaataacctatttagtgaatgaagctcttagaggaggagtagaagggcataggtcagaattatttgcagtaaaagttgcaaaggctaatgcagctcttcgaggcgatgagaatgtaaattctgaagacctaaaagtcgcagttaggttagttattctcccacgagcaatgcaaatccctccagaagatgatgatattcaacccccccctccagaggatcagagtcccccacctccacctcaatcaaacaatgaagagtctgaacctgagtctaatgaaaatgatgatgcgcaagaccaagaacaagaagaagataattctgatggagaagaagaatctactcccgaaatccctgaagaatttattttagatcctgaggcatgtatggttgatcctgatttattacttttttcatcagccaaagcaaaagcaggtaatagtggaagtagatcagtaatatttagtgacagtaggggaagatatgtaaaacctattatcccaagaggtaaggtaaaaagaattgctgtagatgcgactttgcgagctgcagctccttatcaaaaatcacgaagattacgaaaccctaataaatcaatagttattgaagagaatgattttagggcaaaactgctacaaaaaaaggcgggtgctttagtcatttttcttgttgatgcaagtggttctatggctcttaatagaatgcaaagtgctaaaggtgcagttatcagacttttgacagaagcatatgagaatagagatgaagttgccctgattccttttagaggaaatcaggcagaagttcttttgcctccaacaagatcgataactgcagcgaaaagaaggctagaaacaatgccttgcggaggtggatcgcctttagctcatggactaacgcaatcagcaaaagtagcaaaaaatgccctctctactggagatataggtcaagttattgttgttggaattaccgatggaagaggta

SEQ ID NO: 319995 - DNA, 751 bp, Unknown
  Bacterial polypeptide expressing nucleotide sequence isolated from the Sargasso Sea
ctgtgcggaactattgatatagaaaaggctttaagcgaaggagttaaggcctttgaaccaggcttattagcaaaagctaatagaggcttgttatacgtagacgaagttaatctactcgacgatcatttagttgatgttcttttagattccgccgcatctggatggaatacagttgagagagagggagtttcagttagacatcctgcaagatttgttttaattggctctggcaatccagaagaaggagaacttaggcctcagttattagataggtttggtatgagcgttgaggttaagacagtaagagatgcagaattaagggttaaagttgttgatcagcgaacttcatttgatgataatcccgatgaattctcaataagtgttgagaaacagcaagatgaccttcagcaaaaagttatcaaagctcaagagatattaaattcagttcaattggatgatgatcttagattaaatatatctgctatatgtggcgaacttgatgttgatggattaagaggggatattgtaactaatcgatctgcaagggcaattgctgcatttgagggaagaactgaagtgcaagaagaagatatcgctagagtaattacatgttctttaaggcatcgattaagaaaagatcccttagagcaagtcgattcaggagaaagagtcattcaagcattctgtaaagtctttgatttgaatgaaaaagaagatctttccaaatttctattatcatcagaagaataat

SEQ ID NO: 319996 - DNA, 892 bp, Unknown
  Bacterial polypeptide expressing nucleotide sequence isolated from the Sargasso Sea
tcgtgctatcgcggatttattaccagaaatcgcgatcgtacgtgacgatgcttttaattcacaccccactaatcctgaattaatgagttcagaaattctaacacaatttcaaaataacgggactatagaaactgaactaattaaaattccaatggttgatttaccattaggagcaactgaagatcgtgtatgtggtacgattgacatcgaaaaggcgttaacagaaggtgtaaaagcttttgagcctggcttattggcaaaagctaatagaggaattttatacgttgatgaggttaatcttttagatgatcatttagttgatatcttattagattcggctgcttctggatggaatacagttgaacgtgaaggtatttctgttcgtcatccagcaaggtttgttttagttggttcaggaaaccccgaagagggtgagttacgtccgcaacttttagaccgatttggaatgcatgctgaaattcgaacagttaaaaaccctgatttacgtgttcgtattgtagaagaaagaacagcatttgatcaagaaccacaaatttgggttgataaatatcaagaagaacagaatgctttacgtacacaattagttagtgcacaagatttattaccatcagttgaaatggattatgatttccgtttaaaaatttcacaaatttgtagtgaactagatgttgatggtctacgtggggatattgtagtgaaccgagctgcaaaagcctatgctgctttagatggtcgaacagttgtaacagttgatgatattagtaatattatcgttttatgtctacgtcaccgtttaagaaaggatcctttagaatcaattgattctggtgcgaaagtacgtaaaatctttaatgaagtttttgaaatttaa

SEQ ID NO: 319997 - DNA, 739 bp, Unknown
  Bacterial polypeptide expressing nucleotide sequence isolated from the Sargasso Sea
ttgatcattcgaaaattaagtaaaactaaagttgtgaatactacaaagaaaagaagagttttcccttttacggctgtaattggtcaagaagaaatgaaattagctcttttgttaaacgttatagacccaagaattggaggagttatgattatgggtgatagaggaactggtaaatctactactataagagctcttgcagacttgttaccagcaatagatgtagtaaaagatgatccgtataatagttctcttatagatcctgatttgcaaagtaaagaagttttagagaaaattatacaaggagaaaatttagagaaagataaaaaacaagttccaatggttgatttacccttgggggctacagaagatagactttgcggaactattgatattgaaaaggctttaagcgaaggtattaaagcttttgaaccaggattattggcaaaagccaatagagggttgttatacgtagatgaagtaaatcttcttgatgatcatttggttgatgttcttttagattcagccgcttctggatggaatactgttgagagagagggagtctcagttaggcatcctgcaagatttgttttgatcggttctggcaatccagaagaaggagaacttagacctcagttattagacaggtttggaatgagcgttgaagttaagacagtaagagatgcagaattaagggttaaagttgttgatcagcgaacttcatttgatgataatccccgat

SEQ ID NO: 319998 - DNA, 659 bp, Unknown
  Bacterial polypeptide expressing nucleotide sequence isolated from the Sargasso Sea
ttatgttgacgaagttaacttgctagatgatcaccttgttgacgttcttcttgactctgctgcctcaggctggaatacagttgaacgtgaagggatttcggttagacatcctgcaagatttgtacttattggttcagggaatcctgaagaaggagaattaaggcctcaattacttgatcgttttggaatgagtgtagaagtaagaaccgtaagggaggcaaaacttcgtgttcaagttgttgatcaacgtacagcttttgacgatgatcctgaatcattcagcgattcggctcaaggtaggcaagactcgcttcaacaaaaagtagttgctgctcaaaatttacttaacgaggtttctatcgatgaagatctcaggctaaggatttcagcagtatgtggtgaacttgatgttgatgggcttagaggagatattgttacaaatagagcagctagagctcttgccgcctttgaaggaagaaaagaggtgactgaagaagatattgcacgtgtagtttctacagctttaaggcatagacttagaaaagatccccttgaacaagttgattctggagatagagtaataaaagctttttgcaaagtatttgaaagaaacgaaagtaatgatgtatctgaatttgaactagcctcaacaaattaag

SEQ ID NO: 319999 - DNA, 748 bp, Unknown
  Bacterial polypeptide expressing nucleotide sequence isolated from the Sargasso Sea
ttgtggaactattgatattgagaaggctttgagcgaaggtattaaggcattcgaaccaggtttattagcaaaagctaataggggtttattatacgttgatgaagtgaatttacttgatgatcatttagtagatgtacttttagattcggccgcttccggatggaatactgttgaaagggagggagtctcagttcgacatcctgcgaggtttgtacttattggttcaggaaatccagaagaaggtgagttaaggcctcaacttttggacaggtttggaatgagtgttgaagttaagacagttagagatgctgaattaagagttcaagtagttgatcaaagaacttcttttgatgataatcctgatgagttttcattgagtgttgagaaccaacagaatgaacttcaacaaaaagttattaaagcacaagaaatattaaattctgttcaaatggacgaggacttaagattaaatatttctgcaatctgcggagaactagatgtggatggtttacgtggagatattgttacaaatcgatcagcaagggcaatcgcagcatttgagggcagaactgaagttcaagaagatgacatagcaagggttatttcttgttctttaagacatagacttagaaaagatcccttagaacaagtcgattcaggtgaaagagttattcaagctttttgtaaagtatttgatttagatgaaaaagaaaatctttcaaaatttcaattatctactgaagcataa

SEQ ID NO: 320000 - DNA, 838 bp, Unknown
  Bacterial polypeptide expressing nucleotide sequence isolated from the Sargasso Sea
ggcggacctcctgcccgacatcgaggtggtggctggtgacccctacaacagttcatccacagatcccgatctgcagagcagcgaggtgcgggaacggatggaacggggcgactccatctcaacagaaccacgccaggtgcccatggtggatctgccgctgggagccacagaggaccgtctctgcggaacgattgacatcgagaaggccctgagcgaaggcgtgcgtgcctttgaacccggcctgctggccaaggccaaccgcggcctgctttatgtggacgaggtgaacctgctggatgaccatctggtggatgttctgctcgattccgctgcttcgggttggaacacagtggaacgtgagggcgtgtccgtacgccatccagcccgcttcgtgctgatcggctccggcaaccctgaggagggcgaactgcggccgcagctgctcgatcgtttcggcatgagtgtggaggtgcgcacggtgcgtgatcccgaactgcgggttcaggtggtggatcaacgcacagccttcgacaccgaccccgatgggttcagcacggctgtggaagccaaccaggacgccctgcagcaacgggtcgtggaggcccagcaacggttaagtgccgtgaccatcgacgacgacctgcgcctgcggatctccgccgtctgcggcgagctggatgtggatggactgcggggtgacatcgtcaccaaccgtgccgccagggccttggccgcctttgagggccgcaccgaggtcagcgaagaagatgtcgcccgggtggcctcctgctgcctgcgccaccgcctgcgcaaggatcctttggagcaagtggattcc

SEQ ID NO: 320001 - DNA, 667 bp, Unknown
  Bacterial polypeptide expressing nucleotide sequence isolated from the Sargasso Sea
ggtttactatacgttgatgaagtgaatttgcttgatgatcatttagttgatgtacttctagattcagctgcttccggatggaatacagttgaaagggagggagtttcagttagacatcccgcgagatttgtccttattggttcaggtaatccagaagaaggtgaattaaggcctcaactattagatagatttggaatgagtgttgaggttaagacagttagagatgctgaattaagagttcaagtagttgatcaaagaacttcttttgatgataatcctgatgagttttcattgagtgttgagaaacaacaggatgcacttcaacaaaaagttattaaggcacaagaaatattaaattctgttcaaatggacgatgacttaagattgaatatttctgcaatctgcggagaactagatgtagatggtttacgtggagatattgttacaaataggtctgcaagggcaattgcggcattcgagggcagaactgaagtgcaagaagatgacatcgcaagggttatttcttgttctttaagacatagacttagaaaggatccactagaacaagttgattcaggtgaaagagttattcaagctttttgtaaagtatttgatttagatgaaaaagaaaatctttcaaaatttcaattgtctgctgaagcgtaat

SEQ ID NO: 320002 - DNA, 894 bp, Unknown
  Bacterial polypeptide expressing nucleotide sequence isolated from the Sargasso Sea
aattaaacgtgatcgatccaaagattggtggtgtaatcattatgggagatcgaggtactggtaaatcaacaacaattcgagcaattgctgatctattaccagaaattcaaattgtaaaggaagatccgtttaattctcatcctacaaattttgaattaatgagcgcagatgttgccacaaaagtaactaataatgaagaagtagaattagaggatattaaaattccaatgattgaccttcctctcggagctaccgaagatagagtttgtggtacaatcgacatcgaaaaagcccttactgaaggtgttaaagcttttgaaccaggtttactagcaaaggcaaaccgcggccttctatatgtagatgaggttaacttattagatgaccacctggttgatattctactagattccgctgcatctggatggaacactgtagaacgtgaaggtatttcaatccgtcacccagcacgctttgttctaatcggttcaggtaacccagaagagggggaattaagacctcaattattagaccgttttggtttattcgccgaaattcgtaccgttaaagatccggtattacgcgtaagaattgttgaagaacgaacatcttttgatttaaatcctgaagagtggctaaaacgttacaaagacgaacaactagctttaactgaaagtatcgtaaaagcacaaaacttattatcacaagtaacaatcgagtatgatttaagagtaaaaatttctcaaatctgtagcattttagatgtagatggtttacgtggtgatattgtaacaaaccgtgcagcaaaggcatactgtgcctttaacggaagaacagacgttactgtcgaagatattcaaacagtcgttagcctagctttacgtcaccgttaag

SEQ ID NO: 320003 - DNA, 763 bp, Unknown
  Bacterial polypeptide expressing nucleotide sequence isolated from the Sargasso Sea
cgttacgtgcggcccatcattccccgcggaccggttcgtcgcatcgcggtggatgccacgctgcgcgcagcagcgccctaccaacgcagccgccgtgagcgggagccccaccgcaaggtgatcgttcaagacggtgacctgcgggccaagcagttgcaacgcaaagccggcgccctggtcatctttctggtggatgccagcgggtccatggccctcaaccgcatgcaaagcgccaagggagccgtgctgagactgctaacggaggcctacgaaaaccgtgatgaagtctccctgatccccttccgcggggaacaggctgaagtgctactgccgccgacgcgctccatcaccgctgccaagcgacgcctggagaccatggcctgcggcggcggcagtccactggcccacggtctggcccaggcggcacgggtgggggccaatgcgctgcaaaccggcgagctctcccaggtggtggtggtggccatcactgatgggcgcggcaatgtgccactgggccgctcgttaggccagcctcagctggaaggcgacgagccagtggacctcaagcaggagctcaaggatgtggcgagccgctatcaacagctgggcctgcagttgctggtgatcgacaccgaacgcaaattcatcggcagcggcatggggaaggacctggcccaagcagctgctgggcgctacgtgcaactgccaaaagccaacgatcaagccatcgcagccattgccctggaggcactcaaccgctgat

SEQ ID NO: 320004 - DNA, 631 bp, Unknown
  Bacterial polypeptide expressing nucleotide sequence isolated from the Sargasso Sea
ctgatcacaacaggtgattcggccgtgacagcaccccggaagcgcagggtttttccgtttaccgctgtgatcggtcaggaggagatgaagctcgcgcttctgctcaatgtgatcgatccccgcatcggcggcgtgatgatcatgggtgacagggggacagggaaatccaccaccatcagagcgctggcggatttgctgccggacatcgatgtggtgacaggtgacccttacaacagttcgtccacggatcccgatctgcagagcagcgagttgagagaacggatggaacggggggagtccatcaccacagagccccgccaggtgcccatggtggatctcccactgggagccacggaggatcgcctctgcggcaccatcgacatcgaaaaggccctgagcgaaggcgtgcgagctttcgagcccggtctgctggccaaggccaaccgcgggctgctctacgtggatgaggtgaacctgctcgacgaccacctcgtcgatgttcttcttgattccgccgcctccggctggaacaccgtggaacgggagggcgtctccgtgcgccatccagcacgattcgtgctgatcggctccggcaaccctgaggaaggcgaactacgcccgcagctgctcg

SEQ ID NO: 320005 - DNA, 664 bp, Unknown
  Bacterial polypeptide expressing nucleotide sequence isolated from the Sargasso Sea
attgctatatgttgacgaagttaacttgctagatgatcatcttgttgacgtgcttcttgactctgctgcgtctggctggaatacagttgaacgcgaaggtatatctgttcgacatcctgcaaggtttgtacttattggttcaggaaaccctgaggaaggagaattaaggccgcagctacttgatcgatttggaatgagcgtagaagtaagaaccgtaagagaagcaaaacttcgcgttcaagttgttgatcaacgcacagcgtttgatgagaatcctgactcctttagcgattcggtacaggggagacaagacactcttcaacaaaaagttgttgatgcccaaaacttacttcatgaggtttctatcgatgaagatctcagacttagaatttctgctgtttgcggtgaacttgatgttgatggccttagaggagatattgttaccaatagggcagctagagctctcgcagcatttgaaggaagaaaagaggtgactgaagaagatattgctagggttgtctcaacagctttaaggcatagacttcgaaaagatcctcttgaaacagttgattctggagatagagtaataaaagctttttgcaaagtatttgagaaaaatgaaagtgatgatgtatctgaatttgaactagctacaaaaaattaa

SEQ ID NO: 320006 - DNA, 955 bp, Unknown
  Bacterial polypeptide expressing nucleotide sequence isolated from the Sargasso Sea
atgaaattggctctcttgttaaatgttattgatccaagaattggaggcgtgatgataatgggtgatagagggactggaaagtctactacaatcagagccttagctgatttgttgcctgcaatcgatgttgttaaagatgatccatataatagttcactagtcgatcctgatttacaaagtaaagaagttttggaaaaaattacacaaggagaaaatttagagagtattcaaaaacaagtacctatggttgacttacctttaggggctactgaagacaggctttgtggaaccattgatatagagaaggctttgagtgaaggcgttaaagcattcgaacctggattgttggctaaagctaatagaggtttactatacgttgatgaagtgaatttacttgatgatcatttagttgatgtacttttagattcggccgcttccggatggaatacagttgaaagggagggggtctcagttcgacatcctgcgaggtttgtcctaattggttcaggcaatccagaagaaggtgaattaaggcctcaactattggataggtttggaatgagtgttgaggttaagacagttagagatgctgaattaagagttcaagtggtagatcaaagaacttcatttgatgataatcctgatgagttttcattgagtgttgagaaacaacaggatgaacttcaacaaaaagttattaaagctcaagaaatattaaattctgttcaaatggacgatgacctaagattgaatatttctgcaatctgcggagaattagatgttgatggtttacgtggagatattgttacaaataggtctgcaagggcaatcgcagcctttgagggcagaactgaagtccaagaagatgacatcgccagggttatttcttgttctttaagacatagactaagaaaagatcctctagaacaagttgattcaggcgaaagagtcattc

SEQ ID NO: 320007 - DNA, 594 bp, Unknown
  Bacterial polypeptide expressing nucleotide sequence isolated from the Sargasso Sea
tctgcccgtgagccaagccttccaaagccgggtgttcccctttaccgccatcgtcggacaggcggagatgaagctggctctgctgttgaacgtgatcgatccgcgcattggcggcgtgatgatcatgggagaccggggcactggcaaatcaaccaccattcgagcgctcgctgaccttctgccagagatccctgtggtggcaggagatccttacaacagctcccccaacgaccccgacctgcaaagcagtgaggtacgtgagcgcctgcaacgcggcgaaagcatcagcgagggccgctgtcaggtgccgatggtcgatcttcctttaggagcgaccgaagaccgcctctgcggcacgatcgacattgagaaggctctcagcgaagggattcgggcctttgagcctggcctactggccaaagccaaccgtggcctgctttacgtcgatgaggtgaacctgctcgacgaccatctcgttgacgtgctgctggattcggccgcatccggctggaacacggtggaacgcgaaggcgtaagcgtcaggcacccagcccgtttcgttctcatcggttcaggcaaccctgaagaaggaga

SEQ ID NO: 320008 - DNA, 1859 bp, Unknown
  Bacterial polypeptide expressing nucleotide sequence isolated from the Sargasso Sea
tttttgcttcctcctatagaggtattagataatgaatcagtactggaaaagctagccaagagaaacagtaatacttcattaagacctattggtaggaacctagatccatataaaccggaggaatgggatatcagtactaataaattgttagaggagtcaattggaagtgattatttgaatcaaattgaagaaattccaaaaaaagtaagagaggcaccatttattcaagtccccattggcataactgaagacagacttgttggatcaattgacgtcgctgcttcattaagtaccggggaacaagtttttcagcctggaattttggcagatgctcatagaggcgttctttatgtagacgatattaatttattggatgatggtattgtaaatttaattcttgaagctaccgggagagagcaaaacaatatagaaagagatggtttgagcctctctcatccttgtaagtcacttttaatagcaacttataatcctgaagagggtgccttaagagatcatgttttagatcgtttcgcgatagtactttctgcagatcagtctattgataaagctcaaagggttgaaattacaaaatctgttttatcacacgctgaaaataatattaaattttcagaaaaatggtccgaagaaactgataatttatccacacaattaattttggcgaggcaatggttaaaggatgtgaagataacaaaagagcaaataacttatttggtaaatgaagctcttagaggtggagtagaggggcatagatcagaattgtttgcagtaaaagtagctaaggcaaatgctgctcttcgaggcgatgagaatgtgaattctgaggacttaaaagctgcagttagattagttatccttcctcgggcaatgcaaatgccaccagaagatgatgaaattgagcctcctcctccagaggatcagagtccgccgcccccacctcaatcaaataatgacgaatctgaaccggaggctaatgaaaacgaagataatcaagcacaagagcaagaagaagataattctaatggagaagaagaatctaattccgaaattcctgaagaatttatattagatccagagtcatgtatggtcgaccctgatttactacttttttcatcaaccaaagcaaaggctggcaatagcggaagtagatcagtgattttaagtgatagtagaggaagatatgtaaaacctattattccaagaggtaaagtaaaaagaattgccgtagacgcaactcttcgagctgctgctccttaccaaaaatcaagaagattaaggaaccctaataaatcgataattattgaagaaaatgattttagggcaaagcttcttcagaaaaaggctggtgctttagttatttttctagttgatgcaagtggatctatggctcttaacagaatgcaaagtgcgaaaggagctgtaataagacttctaacagaggcatatgagaatagagatgaggttgctttgataccatttagaggcaatcaggctgaagttcttttacctccaacaagatctataactgcagcaaaaagaaggctagaaacaatgccttgcggtggcggatcgcccctggctcatggactgacacaatcagcgaaagtagcaaaaaatgctctttcaacaggagatatagggcaagtcatagttgtgggcattactgatgggagaggaaatgtacctttaggattatctctaggacaaaatgaggttgaagaaaaagataatgataatgtcaatttaaagcaagaggttcttgatatcgccgcgaaatatccaatgcttggaataaaactcttagtaattgatactgaaagaaaatttattgcaagcggctt

SEQ ID NO: 320009 - DNA, 1519 bp, Unknown
  Bacterial polypeptide expressing nucleotide sequence isolated from the Sargasso Sea
catgcgtcaaacgtttccgctcgccgcagtcattgggcaagaaaagatcaagagcgcgctcttgttgggagggatcgatccgactttgggaggaatcgcaatctcggggagaagaggcacggcgaaatccatcatggcgcgcggtttgcacgcgttgcttccgccgatcgagtgcgtcaaggactcgtactgtaacgccgatccgaccaacccggaggagtgggaggagggactcgaagataaagtcactcgcgacgaagagggtaacgttcagaccatcatccgtgacgcaccgttcgtgcagcttcctttgggcgtcaccgaagatcgtctcatcggtacggtggacatcgaggaatcgatgaagcaagggaagacggttttccaacccggtctcttggcgcaggcgcaccgagggattttgtacgtcgacgaaatcaaccttttggacgatggcgtcgccaacttgttgctctccgtgctcgcggagggtgaaaacgtcgtcgagcgcgagggtatcacgctcagacacccgtgcaagccgctgttgatcgccacctttaaccccgaggaggggacgcttcgcgagcacctcttggatcgcatcgccgtgacgctctcggcggatcagatgttgactttcgaggaccgagtcgaggcggtgaaccaggcgatgagcttccaaaacgccgcggaaatgtccgtgaagaacgtggaagaggccacggaggccatcaagacgaacatcgtcttggcgcgcgagtggctcaaggattgcgtgatctctcaagagcaggtggagtacttggtgagagagtcgattcgcggtcaaattcaaggtcaccgcgccgaactgtttgcggtcaaggcggccaaggctctcgccgccttggatggtagatcaaaggtgaacgcggatgatttgaaggaggctgtgcgactggtcatcgtgccccgcagcgatatcttgcaagatgctccacctcctgaggatgacgacgatgagcaaccgcccccgccgccgccgccgccggaagacaacatggaagatgacgatcaagacgaagaacaggaagaggacaacgaggaagaagaagaggaagaggatgacattccagacgttccggaggagttcatctttgacgcggagaccgtcgacctcgacaaggacgtcactcagttcgcgtcccagagcaacaaacagggcggtcgatccggtcgttcgaagaacgtcatcttctccaccgatcgtggtcgttacatcaagccgatccttccgaagggtaacactattcgattggcggtggacgccacgttgcgcgccgcagctccgtatcagcgagcgcgtcgtgaacgcgatccgaacccggagaagaagaaggtgtacgtcgagaagggtgacatgcgcgcgaagaaattggcgcgcaaggctggcgctttggtcgttttcctcgtcgatgcctccggctcgatggctttgaacagaatgcaaggcgccaagggcgcggctctctccatc

SEQ ID NO: 320010 - DNA, 1696 bp, Unknown
  Bacterial polypeptide expressing nucleotide sequence isolated from the Sargasso Sea
caggcaattggaagtgattatttgaatcaaattgaagaaattccaaaaaaagtaaaagaggcaccatttattcaagttcccattggtataactgaagatagacttgttggatcaattgatgtcgctgcttcattaagtacaggagaacaagtgtttcagcctggaattttggcagaagctcatagaggtgttctttatgtagacgatataaatttattggatgatggcattgtaaatttaattcttgaagctataggaagagagcaaaataatattgaaagagatggtttgagcctctctcatccttgtaagtcccttttaatagcaacttataatcctgaagaaggtgctttaagagatcatgttttagatcgttttgctattgtgctttctgcagatcaatctattgataattctcaaagagttgagattactaaatctgttttatcacacgcagaaaataatattaaattttcagaaaaatggtcggaagaatccgataatttatctactcaattaattttggcaaggcaatggttaaaggatgtcaagataacaaaagagcaaataacctatttagtgaatgaagctcttaggggaggagtagaaggtcataggtcagaattatttgcagtaaaagtagcaaaggctaatgcagctcttcgaggcgatgagaatgtaaattctgatgacctaaaagtcgcagtaagattagttattcttccaagggcaatgcaaataccaccagacgatgatgatattcaaccaccccctccagaggatcagagccccccacctccacctcaatcgaacaatgaagagtctgaacctgatactagtgaaaatgataatgagcaagatcaggaacaagaagaagataattctgatggagaagaagaatctactcctgaaatacctgaagaattcatattagaccctgagtcatgtatggttgatcctgatttattacttttttcatcagctaaagctaaagcggggaatagcgggagtagatcagtcatatttagtgacagtagaggaagatatgtaaaacctattattccaagaggtaaagtaaaaagaattgctgtagatgctacccttcgagctgctgctccttatcaaaaatcgagaagattaaggaaccctaataaatcaatagttattgaagaaaatgattttagggcaaagcttcttcaaaaaaaggcgggagccttagtaatttttctggttgatgctagtggctctatggctttgaatagaatgcaaagtgccaaaggcgctgtaataagacttttaactgaggcatatgagaatagagatgaagtagctcttattccttttagaggtaatcaggccgaagtgcttttgcctccaacaagatcaataactgcagcaaaaagaaggttggaaaccatgccttgtggtggaggatcccctttggcacatggattaacacaatcagcaaaagtagcaaaaaatgctctttcaacaggagatattggtcaagttattgttgtgggaatcacagatggccgaggaaatgttccattaggattatcgctaggacaaaatgaggttgagggaaaagataatcaaaatgaaaatgttaatttaaaacaggaggttctagatatcgctgcaaaatatccaatgcttgggataaaactcttagtaattgatacagagagaaaat

SEQ ID NO: 320011 - protein, 308 aa, Haemophilus influenzae
MIIVTGGAGFIGSNIVKALNDLGRKDILVVDNLKDGTKFANLVDLDIADYCDKEDFIASIIAGDEFGDIDAVFHEGACSATTEWDGKYIMHNNYEYSKELLHYCLDREIPFFYASSAATYGDTKVFREEREFEGPLNVYGYSKFLFDQYVRNILPEAKSPVCGFRYFNVYGPRENHKGSMASVAFHLNNQILKGENPKLFAGSEHFRRDFVYVGDVAAVNIWCWQNGISGIYNLGTGNAESFRAVADAVVKFHGKGEIETIPFPEHLKSRYQEYTQADLTKLRSTGYDKPFKTVAEGVTEYMAWLNRK

SEQ ID NO: 320012 - protein, 310 aa, Pasteurella multocida
MIIVTGGAGFIGSNIVKALNELGRTDILVVDNLKDGTKFANLVDLDIADYCDKEDFIASIIAGDDLGDIEVIFHEGACSATTEWDGKYIMHNNYEYSKELLHYCLDREIPFFYASSAATYGDKTEFREEREFEAPLNVYGYSKFLFDQYVRAILPEANSPVCGFRYFNVYGPRENHKGAMASVAFHLNNQILKGEKPKLFAGSEHFRRDFVYVGDVAAVNIWCWQNNISGIYNLGTGNAESFLEVAKAVVKFHGKTEADIEIIPFPEHLKSRYQEYTQANLDKLRATGYDKPFKTVAQGVAEYMAWLNRK

SEQ ID NO: 320013 - protein, 313 aa, Haemophilus ducreyi
MIIVTGGFGMIGSNIINALNDIGRKDILVVDNLKNGEKFINLVDLNIADYCDKDDFIASIIAGDDFGEIDAIFHQGACSSTTEWNGKYLMQNNYEYSKELLHFCVDRQIPFLYASSAATYGGRADNFIEERKFEGPLNAYGYSKFLFDEYVRRLLPEANSAICGFKYFNVYGPREQHKGSMASVAFHLNNQMLKGENPKLFAGSEHFLRDFVYVEDVAKVNIWAWKNNISGIYNLGTGKAESFQTVAQAVIDFHGKGHIETIPFPDHLKSRYQTFTQADLTKLRAAGYQDNFKTVAEGTKAYMSWLNRSLTTE

SEQ ID NO: 320014 - protein, 310 aa, Yersinia pestis
MIIVTGGAGFIGSNIVKALNNIGYKDILVVDNLKDGTKFVNLVDLDIADYMDKEDFVASIVAGDDMGDIDAIFHEGACSSTTEWDGKYMMDNNYQYSKDILHFCLDRSIPFLYASSAATYGGRTDNFIEDRQYEQPLNVYGYSKFLFDQYVREILPQADSQICGFRYFNVYGPREGHKGSMASVAFHLNNQINAGERPKLFAGSENFKRDFIYVGDVADVNLWFWQNGVSGIFNCGTGRAESFQAVADAVVDYHQSGPVEYIEFPEKLKGRYQAYTQADLTKLRAAGYGKPFKTVAEGVKEYLAWLNRSV

SEQ ID NO: 320015 - protein, 310 aa, Escherichia coli [sequence omitted]

SEQ ID NO: 320016 - protein, 333 aa, Chromobacterium violaceum
MTIVVTGAAGFIGSNLVKGLNQRGITDIIAVDNLSNGDKFHNLVDCEISHYLDKHEFLHLLLDGEYEGELSAILHQGACSDTMNHDGKYMMDNNYQYTLALFDYCQHEEIQFLYASSAATYGKGTVFKEERQHEGPLNVYGYSKFLFDQVLRQRIKEGLSAQAVGFRYFNVYGPREQHKGRMASVAFHHFNQYREHGKVKLFGGWDGWENGMQSRDFVSVEDVVKVNLFFLDNPGKSGIYNLGSGRSQPFNDVAEATVNACRRHEGKPALTLAEMIQQGIVEYIDFPDALKGKYQSFTQADIAKLREAGYAEAMLSVAEGVDRYVDWLIGRQG

SEQ ID NO: 320017 - protein, 334 aa, Neisseria gonorrhoeae
MTIIVTGAAGFIGSNIVKALNQRGITDIVAVDNLTKGEKFKNLAECEIAHYLDKHEFIRQVREHILPYQNIEAVFHQGACSDTMNHDGLYMMENNYQYTLDLLDWCQDERIPFLYASSAAVYGKGEIFREERELEKPLNVYGYSKFLFDQVLRRRMKEGLTAQVVGFRYFNVYGQHEQHKGRMASVAFHHFHQYREHGYVNLFGSNDGYGNGEQTRDFVSVEDVAKINLYFFDHPELSGIYNLGTGRSQQFNELAAATVNACRAAEGKSELSLKELVEEELIRYIPFPDALKGKYQGFTQADITKLREAGYKEEFFDVKAGVNRYVKWMLENLA

SEQ ID NO: 320018 - protein, 330 aa, Burkholderia pseudomallei
MTLIVTGAAGFIGANIVKALNERGETRIIAVDNLTRADKFKNLVDCEIDDYLDKTEFVERFARGDFGKVRAVFHEGACSDTMETDGRYMMDNNFRYSRAVLDACLAQGTQFLYASSAAIYGGSSRFVEAREFEAPLNVYGYSKFLFDQVIRRVMPSAKSQIAGFRYFNVYGPRESHKGRMASVAFHNFNQFRAEGKVKLFGEYNGYGPGEQTRDFVSVEDVAKVNLHFFDHPQKSGIFNLGTGRAQPFNDIATTVVNTLRALEGQPALTLAEQVEQGLVEYVPFPDALRGKYQCFTQADQTTLRAAGYDAPFLTVQEGVDRYVRWLFGQL

SEQ ID NO: 320019 - protein, 329 aa, Bordetella bronchiseptica
MIVVTGAAGFIGSNLVRGLNRRGIQDIIAVDDLTDGDKFRNLVDCSIADYLDKDEFRERVRGGNLPALRAVLHQGACSDTTERNGRYMLDNNYRVTLELFEYCQAERVPFLYASSAAVYGGSSVYVEDPANEHPLNVYGYSKLLFDQVLRTRMDSLTAQVVGLRYFNVYGPHEQHKGRMASVAFHNMNQFLAEGHVRLFAGWDGYEDGGQSRDFISVEDVVAVNLHFLDNPGQSGVFNCGTGRAQPFNDVAAAVVNTLRAERGEAALPLAELVKKGLLRYIPFPDDLKGRYQSYTQADVGRLRAAGFSAPMRDVQTGVSEYVRYWRALK

SEQ ID NO: 320020 - protein, 323 aa, Desulfovibrio vulgaris
MYIVTGGAGFIGSAMVWKLNEMGIEDIVVVDNLSTSEKWKNLVNRRYVDYVHRDTFMDMVLHGDLPWDVDAVVHMGACSATTERDADFLMENNLRYSRMLCELCMETGARFINASSAATYGDGSLGFSDDDTTMLRLKPLNMYGYSKQLFDLWAYREGRLDGIASLKFFNVYGPNEYHKGDMRSVICKAYAQIGQEGVMRLFRSCHPDYADGGQMRDFIYVKDCVEVMWWLLQNPGVNGVFNVGTGKARTWNDLVTAVFRAMDREPVIEYIDMPEQLRGKYQSFTEATMGKLRDAGCPVRFTELEDGVTEYVRRYLAAADPHL

SEQ ID NO: 320021 - protein, 338 aa, Escherichia coli
MRVLVTGGSGYIGSHTCVQLLQNGHDVIILDNLCNSKRSVLPVIERLGGKHPTFVEGDIRNEALMTEILHDHAIDTVIHFAGLKAVGESVQKPLEYYDNNVNGTLRLISAMRAANVKNFIFSSSATVYGDQPKIPYVESFPTGTPQSPYGKSKLMVEQILTDLQKAQPDWSIALLRYFNPVGAHPSGDMGEDPQGIPNNLMPYIAQVAVGRRDSLAIFGNDYPTEDGTGVRDYIHVMDLADGHVVAMEKLANKPGVHIYNLGAGVGNSVLDVVNAFSKACGKPVNYHFAPRREGDLPAYWADASKADRELNWRVTRTLDEMAQDTWHWQSRHPQGYPD

SEQ ID NO: 320022 - protein, 338 aa, Salmonella typhi
MRVLVTGGSGYIGSHTCVQLLQNGHDVVILDNLCNSKRSVLPVIERLGGKHPTFVEGDIRNEALITEILHDHAIDTVIHFAGLKAVGESVAKPLEYYDNNVNGTLRLVSAMRAANVKNLIFSSSATVYGDQPKIPYVESFPTGTPQSPYGKSKLMVEQILTDLQKAQPEWSIALLRYFNPVGAHPSGDMGEDPQGIPNNLMPYIAQVAVGRRESLAVFGNDYPTEDGTGVRDYIHVMDLADGHVVAMEKLADKSGVHIYNLGAGVGSSVLDVVNAFSKACGKPINYHFAPRRDGDLPAYWADASKADRELNWRVTRTLDEMAQDTWHWQSRHPQGYSD

SEQ ID NO: 320023 - protein, 338 aa, Yersinia pestis
MYVLVTGGSGYIGSHTCVQLIEAGYKPVILDNLCNSKSSVLARIHSLTGYTPELYAGDIRDRTLLDSIFAAHPIHAVIHFAGLKAVGESVNRPLEYYNNNVFGTLVLLEAMRAAQVKNLIFSSSATVYGDQPQIPYVESFPTGSPSSPYGRSKLMVEQILQDVQLADPQWNMTILRYFNPVGAHPSGLMGEDPQGIPNNLMPFIAQVAVGRRESLAIFGNGYPTPDGTGVRDYIHVVDLADGHVAAMKTLHGKPGVHIFNLGAGVGHSVLQVVAAFSKACGKPLAYHFAPRREGDLPAYWADATKAAEQLGWRVSRSLDEMAADTWHWQSKNPQGYPD

SEQ ID NO: 320024 - protein, 337 aa, Erwinia amylovora
MSILVTGGAGYIGSHTVLSLLQRGDDVVILDNLSNASRESINRVEKLTGKTATFFEGDLLDRSCLRSVFSAHRISAVIHFAGLKAVGASTRKPLEYYQNNVTGTLVLLEEMRSAGVNQFIFSSSATVYGADAPVPYVETTPIGGTTSPYGTSKLMVEQILRDYAKANPEFKTIALRYFNPVGAHESGQMGEDPNGIPNNLLPYIAQVAIGRLEKLGIFGDDYPTEDGTGVRDYIHVMDLAEGHLKALDHLSAIEGYKAYNLGAGKGYSVLEMVKAFEKASGGTVAYQISPRRDGDLAAFWADATLADKELNWRVSRGIDEMMRDTWNWQSQNPQGDS

SEQ ID NO: 320025 - protein, 339 aa, Bacillus subtilis
MAILVTGGAGYIGSHTCVELLNSGYEIVVLDNLSNSSAEALNRVKEITGKDLTFYEADLLDREAVDSVFAENEIEAVIHFAGLKAVGESVAIPLKYYHNNLTGTFILCEAMEKYGVKKIVFSSSATVYGVPETSPITEDFPLGATNPYGQTKLMLEQILRDLHTADNEWSVALLRYFNPFGAHPSGRIGEDPNGIPNNLMPYVAQVAVGKLEQLSVFGNDYPTKDGTGVRDYIHVVDLAEGHVKALEKVLNSTGADAYNLGTGTGYSVLEMVKAFEKVSGKEVPYRFADRRPGDIATCFADPAKAKRELGWEAKRGLEEMCADSWRWQSSNVNGYKSAE

SEQ ID NO: 320026 - protein, 351 aa, Arabidopsis thaliana
MGSSVEQNILVTGGAGFIGTHTVVQLLKDGFKVSIIDNFDNSVIEAVDRVRELVGPDLSKKLDFNLGDLRNKGDIEKLFSKQRFDAVIHFAGLKAVGESVENPRRYFDNNLVGTINLYETMAKYNCKMMVFSSSATVYGQPEKIPCMEDFELKAMNPYGRTKLFLEEIARDIQKAEPEWRIILLRYFNPVGAHESGSIGEDPKGIPNNLMPYIQQVAVGRLPELNVYGHDYPTEDGSAVRDYIHVMDLADGHIAALRKLFADPKIGCTAYNLGTGQGTSVLEMVAAFEKASGKKIPIKLCPRRSGDATAVYASTEKAEKELGWKAKYGVDEMCRDQWKWANNNPWGYQNKL

SEQ ID NO: 320027 - protein, 350 aa, Pisum sativum
MVASSQKILVTGSAGFIGTHTVVQLLNNGFNVSIIDNFDNSVMEAVERVREVVGSNLSQNLEFTLGDLRNKDDLEKLFSKSKFDAVIHFAGLKAVGESVENPRRYFDNNLVGTINLYEVMAKHNCKKMVFSSSATVYGQPEKIPCVEDFKLQAMNPYGRTKLFLEEIARDIQKAEPEWRIVLLRYFNPVGAHESGKLGEDPRGIPNNLMPYIQQVAVGRLPELNVYGHDYPTRDGSAIRDYIHVMDLADGHIAALRKLFTSENIGCTAYNLGTGRGSSVLEMVAAFEKASGKKIALKLCPRRPGDATEVYASTAKAEKELGWKAKYGVEEMCRDQWNWAKNNPWGYSGKP

SEQ ID NO: 320028 - protein, 354 aa, Cyamopsis tetragonoloba
MVSSRMASGETILVTGGAGFIGSHTVVQLLKQGFHVSIIDNLYNSVIDAVHRVRLLVGPLLSSNLHFHHGDLRNIHDLDILFSKTKFDAVIHFAGLKGVGESVLNPSNYYDNNLVATINLFQVMSKFNCKKLVISSSATVYGQPDQIPCVEDSNLHAMNPYGRSKLFVEEVARDIQRAEAEWRIILLRYFNPVGAHESGQIGEDPRGLPNNLMPYIQQVAVARLPELNIYGHDYPTKDGTAIRDYIHVMDLADGHIAALRKLFTTDNIGCTAYNLGTGRGTSVLEMVAAFEKASGKKIPIKMCPRRPGDATAVYASTEKAEKELGWKAKYGVEEMCRDQWKWASNNPWGYQGKH

SEQ ID NO: 320029 - protein, 348 aa, Azospirillum brasilense
MTDQTAASPRVLVTGGAGYIGSHVLHALTDAGIPAVTIDDLSAGRREAIPAAVPLVEGDIGSAELLDRVMRDHRVDAVMHFAGSIVVPESVVKPLDYYRNNTANSLTLLGACLRAGIDKVVFSSTAAVYGAPESVPIREDAPTVPINPYGASKLMTEQMLRDAGAAHGLRSVILRYFNVAGADPAGRTGQATPVATHLIKVACQALLGRRPPLAIFGTDYDTPDGTCIRDYIHVSDLADAHVLALLHLRRGGGSLLMNCGYGRGASVREVVRTLEEVSGEQVPATFADRRPGDPPQLVAGADRIREQLGWVPKHDRLDGIVRSALSWERSLEQSVGQAGAPGGSASRS

SEQ ID NO: 320030 - protein, 331 aa, Lactobacillus casei
MTIAVLGGAGYIGSHTVKQLLAAGEDVVVLDNLITGHRKAVDPRARFYQGDIRDYHFLSQVFSQEKIDGIVHFAAFSIVPESMKDPLKYFDNNTGGMITLLEAMNQFGIKKIVFSSTAATYGEPKQVPIKETDPQVPTNPYGESKLAMEKIMHWADVAYGLKFVALRYFNVAGAMPDGSIGEDHHPETHIVPIILQVAAGTRTGLQIYGDDYPTKDGTNVRDYVHVVDLADAHILALKYLDAGNKSSAFNIGSAHGFSNLEILNAARKVTGQEIPATMGPRRAGDPSTLIASSEKARDILGWKPNYDDIDKIIETAWNWHENHPEGFGDRN
